United States Patent Application Publication US 2026/0265781 A1 - sequence listing, part 18

SEQ ID NO: 118 - DNA, 18231092 bp, synthetic construct (residues 10,128,386-12,154,062 of 18,231,092)
  source 1..18231092: mol_type = other DNA; note = Hot spot 2 - Chr 3 contig ref|NW_020822577.1 from Cricetulus griseus
agcccgagagcaggagctgggagaggttccgagagcctagggcagatctcatggctggtgagccggtgggtgggagagagggcgctggagcagcagacgccccaggctctctgcagttccctactgctacaggtccacagcttctggctttctgaccatcagcagagtgaaatccacaggctctgtaggcctcccctaggcctccccattctaaccacagtccacctacccttcactcttgactcctgggagctgcttcttcaggacttctttgtcctctgcagagaggaggctaaagcccttgagctggctggcactatactcaggccggaagcccagctcctcccggttcttgacaaagcaagttggatggtaccagcggtcaatcatacccagttgtggcttctccgggtccagcattttcttggagaggcgcacctggccctgtggggaaaataatgtggtacctaaggaatgacgggcaggacagggaacagctaccctaaggcaccaagtccaaaccaaggcacaggtggcaacctggaaaattttggcttaggccatcaaggattgtggggcatccttaggtccctgcatttacattctatgagacggacacgctacctaccacgttaataagacaccttgcacttacattttagatggctatctacccacccacctgcttagacaagtaacaaagtactaacactcctggggtgggttaggatgctgacatgatgtgctggtctgcagtgacactgcaccattctgtgatagcttcactgtggcagcttatcctgacaggggcttgccacctatcctcacccacccatggactctgtggctgcttatcctgacaggggcttgccacctatcctcaccctcccatgaacattgtggcagcttatcctgacaggggcttgccacctatcctcaccctcctgcggactctgcggttgctatatttaagggttaggctaagctgcagtgacaagcaagagctgggtcctgccagcctgccaggtgtacaattcccaccactgacattcctataagtttcccacctatgaggtagctgcaaagaacccagtggccagggctcctgacaatgcagaaaaacgcatctggggctgagtcacactcaagtgcacagagcaggaagcaagagcaccataatttttgcctccaatttttaatggtgaaaggtgagggcatttagcaatggcatttccctcaattttctgtctgttacattcggctcctgaattatcccaaaggcccttagagcaccagactgtgatcctcatgggcggcagtggaaagcctagtgctagaagggtagagatttgggttccccttggtattaagatgttggtctttctctttcccttggtattaagatgttggtctttctcttccccttggtattaagatgttggtctttctcttccccttggtattaagatgttggtctttctctttcccttggtattaagatgttggtctttctcttccccttggtattaagatgttggtctttctctttcccttggtattaagatgttggtctttctctttcccttggtattaagatgttggtctttctcttttgcgtcccatgagccgatcaggcctccctggccatgctcctgccatgtgtgatgtcactacaggcccaaaccaacagggccaaggaaccatgactgagacatctgaaaccgtgagccaccacaaacctccctgtcttcagctggaccatctctggcattgtcaccatacagaaggttgactcacatggctcacagcggggagaaaccctcaacaagcactatgtgattcacagcactggagaagagaacattggcgagcacaggcacactttctaccccattctcagccagccactccacctaactggctgtcggccttcagggacaagaactggtggcaggggaggctgctctgtgaagttcctctggtgatacaggggtgctaacctccaaccccccacacaagaactccctcaagtcaccaagaactgctgactttgtggggacctttgccggtgctctccaagatctttcttgcagggcgccctgctgatgagcccaggactaggccttcctaaaacacgggccattcccatctctacaaggatctccactgtatctttaaccacatggcccgaggcagaaggtaaaggctgtttgctcttttctcctgggacctggaagtgctgacacgggcccaggcccaccttttctatcttctccatacagcccttgcatgtgctcctgttggacttggcatactccgctgcaaagtcacccagcgtcttctctgacttgccgccacttccgtcctggcctttgcctgaagaacagaacacatctcactgctcaactccgcagtcccaatgcccccaacttctgtcttcctcctcccaggatcctcccacaaggacactgttttggctgaccataatcagtctaggtcatctctactggcaacaactgtggttactttctgttataattcccatctcagacttctcattgctattgtgcgcctatgattcaaagttaagtgttgaactgaaaggaacatttaaatacagataaaacaccagtctatataagacctgaacatacgtcgaagggcttgggggaagagacaaaagctagatctagaaagtttattttgctttatgtgtaggggattttgcttgcatgtctgtgtatcaggtgcatacctggtgggggaaagaaatgggtgttggatcctctggtactagagctatgaacactgtgagctgccttgtaggtgctgggaatcaaacctaggtcttctagaagagctcccagtgctcttaaccactaagctacctctatagtccctggattcatactgggtgtggtggcacatgtttttttttctccggtttttcgagacagggtttctctgtggctttggaggctgtcctggaattagctcttgtagaccggctggtcttgaacgcatagatatccacctgccgctgcctctcaagtactgggataaaaggtgtgtgccaccaccacctggcagcatgtacctttaatcccagtactcgggaggcagaggacagcctggtctatataagagttccaggataaccagggctaaacagtgagagtctcatctaaaaaataaatatggtgtgatggctttgagggcaatatgcttgacaactttaactggccatgactcacgtaggaaggagaaagcagattcccacaaattgtcttctggcctcctcaagtgaacctttggcccacatatgaagacaataaataagtctgaacatggtaatattcacagggtagcctcaggactctatagaaaagctactagtaagtatactttgcaaatttataggaaaccaggacaatatgcaaatgtgaaagccatttccacatgttagaaataaaaaccattttaatttaggaattaaagcacatagctatttagatacatagactacttcagagagtataatttaatttaaatacataaaatatttcagagcccattcctgtcatgatggactcttcttcgccctctggaaccaggagcccaaataaaatcttccttctctaagttgctttggtcccgctgctccatcacagcagcagaagtaactaacagagcctttccgacaaatgcggcttaacaacaggaaaacccctcactgtcttccacacaggtaacacaagttaattccacccaagtgttgtggggtatttgttcaacacgtggagatgcattgctgtgattggtgcaataaaaagctgaatggccaatagctaggcaggaggtataggcgggaaaggaggagccggaggaaactaggcaggcaggctcggccaagagacatagagagcaaacaggaggcctaagatggaagagaggtaatgccatgggatagaacatagattaatataaatgtgttaactgaagttataagagctagttaggaacaagcctaagcaataggctgagctttcataataagtctctgtactgttgtgatctggtggcccaaaggaaagtccaactacacccgagttccattcttgggacccaatcagctttaggaaggaattgccagggcatgtgtacaacccccctcctcacaaataaatacataaatgtaataaacattataattaaattgaaaggcaagccacagaccgggagactgtataaccacaatccttgtgtttggccagtggtctgcacctagttaaacactcagagttcaggaataaagtagacatggaaatcatgacaagcaggctggggaggtggctcagagtatttgttgctcttgtagagaacccaggttcagttcccaggacgcatacatggtagttcacaactatctgtaactctagctccaggggacacaaagttcttctctgagctcctgggaaccaggcacaaatgtggcatgtatacatacgtacactaaggcaaaacactcacgcacgaaacccaaataaataaataaataaataaataaataaacaaacaaataaataaatccaaaaagtttagaaaaagaaactggaaaaaagaaaccatcacaagcgctacaggctgaatatccccatccaaaagcctaggcaatctgttctcacattcagagtttttgttttgacttgtggaataactgcagatacacaaaacatcctgaagacaggacgggctgcaggaccacatgaaatccatctgtttctcagacatggtgtacacagagcccaaaggtaagtgcacacctcagtatttccagcctgtctacgatgttgactccaactgtcatgaaatcaggtgtggaattttccacctgcggtgtgtactgctgttcaaagtgtcacactgtggagcacttcagatttttggatgaaggacactcaaatttatcaatattacaaagtctggtggaatacacagtcaacaactcagagtcaccaagagaaaactggactagcaaagtatggtgttcaaaggaaggaatacagttcagctacagaaccaaggacacatcacgctgaatgaagaagtacaaaagaaagtacagacgtttatttcccttcttccctgaaactaaacccggggctaaaaatcagaacagaagccagcacgggagcgcacacctgcaatcccagcactcaggaagctacagtaggaagactgatgactgtgaggacccctctcccctcaaaacagggtttctttgtgtaaccctggaacttatctctatagaccatattggccttgaactctcagaggtcagcctgcctctgtgagtgctgggattaaaggtgtgtgccaacactgcccagcctgaggtatgtttttattttgttttgagacaggatcttcctacataacactgggtgtccttgaactcacagagatccacctgcctctgtctgaggtctgcttcttcttttttaaggcaagaattagcagtatgagaagaagataaggcgcagaagtctcccccttggggtaacgtgcccatgtaaataaaggagacccaactcagtaaagctgtcctctgacctctcgagcgggccacatatatacatacacccctaataataaaataaaaaatttaaagcctattaaaaaacaagaaccatgcaaatttaaaggctacatttccagcgtctggaaaaacaaaccatcaaacctcatgcaataatagaccacatggcagtgtgctctggaacccgacatgtgcaggacagacagggctgtacctgccccccatacacacctgccacgcccccagcctctgctgtcttcttgaccttctgctggtcatcccaccgaagttcagagaatccgtccacctcaacgtcaggctgccggatggagtggcccaccttccagaagcaggagaagtggtaccagtgtgggacctttccgtcaaacatgggtgactagaagtcatagagcagaggtaaatgagatgttaatctctgtgctggctacaggtccacctggtccccagcccagttctcttccctgcggcctgcctgctgttctcatgtcacacaatgacttgcaaatggatgagaaacagtttcccacatctcacctaaagtgttttcctaaagccggccacccccaaatccactgagcaagagaagtggcccaggttcctttttgggtatgtgctgtacttctgacttgccacacaggccagtgacaaacatcacatattattgtactggcgacccctgtatcgttagaaaagccaggcagcagcattggagctcaggggtctgggcgccccagaaatggcttacgtgcccctgcagtgaaaaataatgaagaatcagacccagataatgagccaggcagagaaaatgtgtcaggagcagcaagcctggcacccttgagtgcaatgaacaccttctgtgaggggccaagaagagcctgaggggaaggcctccaggccttgtgcagggctgaccactggcttcagggagactcgggatctcccatgggcctgagtaagtagaggcactgtgtttctttccctatgacactctgggctcggtactgcctgtctgagatggtgacaatgctgtgagcagagacacacaggcattaacccagtttcccggtgcttttccttcacgagccatgccactgtgaagcagcaaccctatcccacagacggcggcaacaatggaggtgaactggacccgaatgtgagccaaggttcttccaccatcctgacggcagaagacctacttaatacaaactgctttctgacctcagtgagatggcccatgatgacttcaagggacagagaggtaaaggctgatgaaataaacacctcactgaagcctgaggatggagctgtggagacaagtggcatttggaaatagcatgacaagcaaggcactccagctaagcactcccattccacgggtgacctcctttttagatgcaataaaatgtaaggcttagggctgtggagatggctccgtggtaaagctgctctctcagaggacctgggttcgaatcctagcacccacaaggtaattcacaaccacctgtaacccaagttccaggggatcagacttcgggcttctttgttcaccaggcacatggtacacagacacacatgcaggcaaaacactcacacataaaaattaaaaaatctaaggccaagaccttccccacagtaattgctgcagggcctgcaaagctcctcagagctccacccactgctaccccaatttcattgctggggcaggtgtgaacacttatccaaagtttcaaaccagcagaggagtggcgggggaactgcacaaaagacgggcctctaaaccagacaatagatggcatttcggaatggacccagcttgatcataccaggcaaagggttcagatcccagtgtccctatggcaagggcttctgctttcctcatcctttacctcagttactccacagcgctcacttactctaatacaaaaagggccccacagaaaaacaaacactcaaccattgccaggattgagaacacacgggccagggtcctaggagcaaggtacagaatctggaacttggacctatcaagaacagaggactagccatggaccaagtgcctcacccagccctcagcaaccataaaggctgacccggaaccttgccagcgagagggagatggccaggctctggaaataccattctcaaacccttccagggtcatcccagtcaagtggctgggagtccagcttctccctccagcaagggctctgaaaaaattaggttgtcggggctggagagatggctcagtggttaagagcaccgactgctcttccagaggtcctgagttcaattcccagcaaccacatggtggctcacaaccatctgttattataagatctggtgccctcttctggtgtgcagatatacatggaagcagaattgttgtatacataataaaaataaataaaatcttttaaaaaaattaggttgttggactctcagagaacaattcgcatacaaatgtaaaagaaggtatttaaattcaagcaccagggccaggcgttgatggcccacgcctttaatcccagcacttgggaggcagagacaggtggatctctgtgagtttgaggccagcctggtctccagagtgagtgccaggatagggtccaaacctacacagagaaaccctgtctcaaaaaactagtaataataataataataataatataaaaaaaatttcaagcaccagaagaaaggtttctttcaagcaggccagcccaggctcagcctccaagtggactccccaacaacaacccaggaagaatcccccttattttgaataataaagagtttctttcacaatcaaaatccagaggagggccttgaatgcaagttatctacaggagtcccagcctccccaaccttaccttcctaagacagcagtgggggcggggggtcataatttcatcgaggactattttctggctaacactgtgaaccttaaaatgcctaataaaatatgcaaggtctggaaggaaacagattacttgaaaggctggtcgcacacatttgatcttagcactggaggaggcagaggcaaggggatctctgtgagttcaaggccagaaggatgacatagtgagaccatgtctcaaaagaaaacaacaaaaacatttgaaaggctgagtatggtggtgcaggcaggtaggctggcctgtaattatcagcaccccagagatggaggcctgaggatcagccttgaaaccttgtctaaaaaccaacctacttctggggaagtaccattacttcaaattttacaaacattccccataatagctgctgtaaatagtgatatttacataaagtgatatgaaaaggtaagcctacaatgcctttgcttttctgcttacactcaagattggaagaaataacgggcttaacctaaaagctagcaaggatgtgtggatgccagtttcctcttaaaccaggagagcactgagttctatttaccacctcagagggtaaagttcaaaggcctcagtgggaaacagggctcggaaccctttttcaaccctttaggctcctctcttagctatctccatcttcctgtcttacttctgtgaataaggactctttgttttttttttttttttttttttttttttggtttttcgagacagggtttctctgtgtagctttggagcctatcctggcactcactctggagaccaggctggccttgaactcacagagatccgcctgcctctgcctcccgagtgctgggattaaaggcgtgcgccactaactcctggcgaataaggactcttaatcaagttcccacacttgaccaggacttcttgggcgcctccctcctggcgcccagctctatcagatcaaggtttatcaatgcttcccacattccccagaaagcgcccagagtgggttccctgtccaatcaagaaggcaagcaacaaagatgtgcctaacagtacttgtgattttttgtcaccagtgataattatagacactacggcagagcctgggacctagctgctacttaataaatatacacaaaatgaatgagaactgtgtgccaggcagtatctcccagggaatcaaggtgacaacttcagtttttgccatatgtgaactaatggaagcaaagtgggtccttggtactcactgggtgaacgtctcacccgccccccaaaataagtacggacgccattgtgagctgtcaggcttttctgaaaccattacagcagctggacagcaagggaaatcaattatcttgaccattagcagtgagcttgggtaacttgaggatacgggggaggtagggacagggcgggagagagaatcacacttgcaaagacaggcatcagaaagccagaagtccaggaggcagaagccgctggaactcttcaggtccctttagccaaccaaccacctcagagtgcatgcccactcttctctaaccatcacgagaagcatcagtgaacacaccagatatgcaaaaagcgccgagaagtcggtgatctcgggaagtttggagaaaatgttatttccaactagaaatcaggcccaaagctaacgtactgtaaagaaacggcagtgttttgcatagttaaaatagaaacatggagagtgaacgaatgtcgaaaggataaccaaaaatagactcaagggaaaaaaaaaaagaaaaccaaaccctaacccccacacgccagtcctctttattcacctgggaataaaaatcttccaggacaaggtaggcccaaatcagagcagcttcaaagacggcgccgcgcagccctcctcccccaccccaagagaaggcagtgaaatgaacaagaactctgcgtccatccagacccagcccggaggctccttgtttttacaaagccagatgctcttccttcccgggcttttcttgcagggtgagcgcaatctcccggaaggggtcggcccggggggcctcaaggatggcggcggcgcccttcccgcccttctccccgttacagtgagccgcagggggagcgcggcggccccgagcccaaacagccgcggtggccgcgccgccctgcgccccccggcccggcccggccgggccccgccgcacctgcaccatgatggccatgcggagcgagtccttggggatactctcgctgcatttcttgcaagaggcgcgcccgctcttagcgtactccacccggtaaagcctctccgaggcctccgccatccttcctctcgtgccgcagcggcagccagacgccgccgctcgctcgcccgcccgctccgctccgctaacgtgtcggttcccgcaagcgtgcggcgccgcctccgctccggatagattgctgatgcctggcggcgggaccgcccccaggcccgagcgcgggggcggggcctctgctcaaggggcggggcttcgacaagcgctttggggggttgcgttccagcgcgactgcgcctgtgcgcgctggtctcgccgcctctaggcaggggcgggggcggggcagggaggccgggggcggggcagggagggcgggggcggggcccgaggaaggcgacaggtgccgccccttttgtctgttccagaaaggcttccttccttttccagctgcttccacttctccccgtcacgttttttcttgctctgtctgagagggaagcctgctgacccgagggcattctggtctgcagcctccagactgctggcacggcaaaccaaccgaagcctaactttccattcttagtaaactgaaatacgtaactataaattccaagacagtgagcagtaagtacctgctttcaaatcatacgccgggggcgagggagagtcacatgactgttccctactctagtccaggtgggagtccttcccctttgccttgcacccagtcctacctttgttcaccccagcaaatgcctctttgctgcctctgctctaaaccacgcaggctaggctatcccagacttaaaacacagaaagtatcacagagcagattacaatgtgtgaattgcaggggtgttttgcctgtatggatgtttatgtatcatgcatgtgcagtgcttttggaggccagacgttttcgtttcccctggaactggagctaaagatgattttgtgactgactatgcaggtactgggaatcgaacccaggtcctctgtaaagagcagcagtgctcttacctgctaagccatttctccagccccccacccccgcctatttttattttttttaaacatactttgggatcatgaataaggaaaactcttctctctctctctctctctctctctctctctctctctctctctctctctctctctctctgtgctacccagatgggtatcaactcctggttgaatgattctcttgactcactgcatgagtagctgggacaacaggtggatcactgcacccagcagcactgaaaatcttgttgtatatttcactgtttttctttttcaacttcctctgtggatttcctgtactacttttcccattaaaaatgtcctcgttctatttatgttaaatttcatagttttttttttaaggaagcatttattgtttttaaagatgtatttatttatcatgtgtacagtgcaggccagaagagggcaccagatcccattacagatggttgtgagccaccattgtggttgctgggaattgaactcaggacctctggaagaacagtcactgctcttaatccctgagccattctctccagccccaaatttcatagttttaaaagacttatttatttttatttaatatgtatgtgtgttttacctgcatgcatgcatttatgtaagaacccatgtgcatgcccatagaggccagaagatggcattagatcccctgaaactagagttatagctagtgtgagcctctgtattatgggtactaggaacccaatctggctctggacaaagcagcaagagccattaacctctgactcatgtctctagcctccagttttttttggtgtgtgtgtgtgtgttttaagtgatgtttattgtcttacttaattcccttgtttgctcttaacttctgaatgatctttaccgtggtttgtgttgtctgctttcttaagagggtaagactacagaaagaaagccctgagatgaaggaagaagacagtgatgaaggagcctgggctaggcgattggtgcggccctgtggtgcgggaggcaggcctgctgtttctccagcagactctcaccacacattgccttctctactcctcttcctccccctatgtcagacaagaagtgtttgttgttgttgctttatcttgcagtgccggggagggagcccagaacttcacgtgtaccagacaaattttactgctgagcaatatctccagtccaacagccttattgtctttttaaaaaattattcaattattattattgttgttatcattattaattatggtgtgcgcataggggttagaagacagtgtgtgggagctggttcactcttcatcatgtgggtcctggagattgaactcagatcatcaggtttggctgtcagtgccttaacttgctgagccatctcactggctagtcatattttaatatatgagttatcttgtattcttagcctagtatctgtcatatggtaggtaatcaatgaaaatttactgaatgaacaaatgatgcatatataaatatgtatgaaggggtatgtatgaaaaaaaatcagcaaggatccctaaaggcatagtggagagtgggaaccactgtgtggtgccagtgttagctccttaattccatctatcctgggcaggcagagcccagccctgttccaaggactctacccacatggacctgtatctactgagcacatttctcacagagcaaataaacccagttattttaaaacacgaggccaacatcatgaaactcacaattgcctctgaaaattatgttcccttctaagcctacgcagaagtcctagctgctgattttctgtcaagagtggagcttggttgtgtgggcataaccaccctaggaagaagtaactggggcccacagccatctgaaggctgattgatggggggacccaggcggtcacaggaggtccttcctttgtccccctagtccctccagctggggaggtgcacagccttctagctagtttgagaaccttcatcctcctttgctcggatcctcttgtatttttgacaatcacacgtgcaggagggtaggaaagaaaatgcagatagtgccccatccaagagggaaaaggtttcaccaaaccaaagtcacattacagcccatctgggaacccttgtgtttatgtcaatggttacataagtctaatcagagtgtagatttcttaactgtattcacacacaggcacttttcaattacagtggtttatttttcagtaacacttcctcttttttttttttttaaagctttaaaattctgtcattctcctctctatataatttccaagggcaggaaatttcaacgagaactaagtaaacacatgtaatttcacattttaagatttgatctttttgaattacagttgaacattattacggcatgatttatttgacatattgagaaataattgactcagatcttgttccctggaagacagtcacatccagtgaaatctccaggattttaaaacagagagggattgtggaagtatgttggggggtgggggtgggggtgggaatcacacagctagtgcagcttgggatgagcacagggtggcctgtgccatcctcagtgactctgtgaggacatgattcactcctgagctgcagtcagtgttctgaaaggcacattctatagcccttaggtgaggaggtagctgggatgtaagaagggtgtgtgcagcggtcagcaagccctggaattacccatactgggaagctgggccaactcaagataggtttggtcttcttgtctgttccatagatggttgcttgaagcaccaggtccctctccagggtcaggaggggataatatttggggattttgacccatgagaacctttgtacaaatctgactggccaactgtagttaagaacccaagccaggagcttgacacctgccacagcccagctaaattgcgtgggttttcctccaccatgtattagatcctgttttataatcatctcctcatgtatctggctttttcatgtgtctaagtctgttcagatggctatagcaaaatcccacagactgaatgctttgtaagcaacacagagctgggtggtggtggcgcatgccttttatcctagcacttgggaggcagaggcaggcagatctctgtgagtgtgtatgtatgttgtacttgtatgtgtgtgtgcatatacatggtatatgcacatgtatgtgaaggccagaggagaccatcaagtgtcctacgttatcactcaccaccttgttcccttgagatacaatttctcattgatcttggagccaggctggcagccagcaatccccaaccacttttctctgcccccccacagtgatggggctacaggttcatatggctgagctcttgtttttgacatggggatttgaactcaggtcttcatgtgtgcatagcaatcacaattactgagtcatcctctccagtccccggggcctcttttataagggcaccaatcttctccaaggcctcctaagagagggctcggtggtcaagagctcttgccgctcttccagatgtcccaagttcagttacttgtgatataactaggtggctcatatcagtctgtaattctagttccaggggacccagtaccttctggtatctgtgtgtatccatgtacacacacacatacacacacacacacacacacacacacacacacacactaataaaaaagaattgaacaaatagatttggaggaaacatgaatatttaacccatcaaaccatctaacctttgaactctttgaggtcaaaggccatgtcttattcatctttcagcactagtactcagcacaatattcccacaaaaagaattccataaaggtttgcaacatacatgagcaatagcccatatagggccaactccagagtgacacagcatggttagccattgcctaataaatctaaacttgatcatcccctttgatgtatgattacatttgtaggtgtgctctaggaaaacttgtgactgagcaatgggaagacaagaagattacaaagatgtttgtagaagatttttcataacagcacccagtggaactaatatacccacaaaaggtaaaataaacacacacattacaatgtactcacccaatagaattccagcacagcagtgtgaaggaatgaattacagctcaagtatcaatacacatgattctcacagtgctaagtgaaaaactgaatcagacttactaaactcatttagtggggtaggtccatttgtacaaaactcaaagccaaaagaaaaaaagtaatatactattgaaattgcttacgcactacattccttaaagaaatacaaaaagatgtgacaatgcaatgttctgaaaataaacatctcttacattctaagagactggaacttttgggggacctcacagccagtgttaataaataataccctttaaaatcacttaggactgctctcctactgtgtactcagtttgtttgtttaacttgcctttaagagaacagtgtagcaaccaattttaattgccttcggtttccctcaagtaatcaacttttacaacctaagctaattgcttagctgtagtcataagttatatactcttccatgccccaactcatataatgtatgtgtatcatctgccaaaagcagcaaatgcagaggctgaaagccaccatttatggatattggttgataaacaatgatgtctggagtcctgtttgttgtctgggtcaattggatccagttggagccagtgacttaatcccttataaaaaattctgtttgtaaagtattccattccttccacgtgtgatgctttttatgctgttcaataaatagagtgaagtcctttgttagaaataacacacacagatcacacaacagacaaacacagagacacacagtcacagaaacagacagacactcagcggcatacagacaaagagaacaaatagagaacaagactcgggaaacatgaagtacagaattcaaaatctggacccactcttggttaaacgattccaaggggaagtgctttctttctttctttaatgtgattttacctatgtattattgctgattcagggttaaacactaaggtgtatactctgtgtaaagttgttgacatttcaagtagtggttattttaggggcataagtgaaataaaatggagacagaaaactcaaagagcttcaaagtctttttttttttttaactagcagatgaatgtatgactattttattttggttcttttgaaatgttatgcataatggcatgctcctgtatttcacaacaaaaattttcaagtagcgccaccaccgcctggctgacctgagtttcttaatttgctatgaaaaatagcaatgtctggtagacttgaatttacaatctataggcccagtagtgcttccctttaggaaagtaatggaagtcaattgaaactctgaagggacagagagtcaggtattatagcgtagactcagaataaccccagggtgttgaagggtcatgttccagcttggtgttcttgggaagttgtatggcaaaccattttctggaaagatgcagcacctggtctacttaccccagatgggggcctcacaacagaccagagtaccgataccaccaaagtccagcttggtgcatcagtgagatttatttggattacttatgggaatatggatgcttatttataggaatatagatggctactctcaggagcagaaacgactcacagacagctgcatcaccaaagctcaccccagcattgatagccctcaaaagctaggaaacgtggagcatactgcacagcctgcaggaaccttaaccaacgggttggagcatgtcccttccaagtgaagcccttccaggtagctgggctggtttctgtttcttccaggcagtccatctggtcttagagtcttctttgttgagtcagtctcagaggagcgctcagctttcattgcttactatggcggggagggccctagtggacctagtcaatttcagggacttcctgaagctgttatcagctgcttaccttcctgcttaaagagcttccctgaaggattgcatattttaatctccaaggaaactgttctgcaacagaggtggtgagaacttcaagaagcagggcctagcaggaggtcttgggtcacgtggtagcaggaccccagacccttcctcttccccctttcacttcctggtgatgatccggatggctctgctctcatctctgaagttacagcctcaccacaggccccaaaacagcagggccaactgacagtggatggaaacctcccagaccatccaaacaacccccttttcctctgtaagttgtttaactcaagaatttgtcatagtattggaaagctgactaacaacctggaaccagcatctgggcacagatgcaagcctgctggaggtactgcccttcccgaatctggcttctgaagcatgccgtatataacctttgacacactgatcttgtaacgaagtcaggtcaaaatgctcctaaaatacagcttgtttgtaactctttgaaactaggaagattgacttggagtcttgagagatctttgcacagcttggaaataaattgccctaatgtccactagatggtgtccaatatatacccacagtcctgcctcatgattctggaagcccgactgaagctgatgaaggaaccctgtatggtgtgacacacctggtttggttactatgttttgttttctggtggctggcagggacatgctttccagtggaggagaaaggagggctcctgggctgtggacagagaaactcaggggctggcggaggtgtccttgggagaatcggatctggatctgggcctgggccagggctgggcagtgagtgacaggtgagggtagattcaggggtcggagggacaggtcctgaggggcaggttggtcacagcactctttgaacttggttgttccaatctttcctgtgtcttttttttttttttccttcagaagttgtaagctacatgaatgcaaggaagtggttttatccatgcagatgcttttcaggacccttgcactgtatttatgctgataacaaataacatagttcaatggttagtgttcatcaatttgtctggatttggagtcacctgggaaacacaccctgggtgtttctctgagggtttttccgaagagggttagctggagagggaagacccactctgaatgtagacagcaccatccatgagctgggttcccagactgtataaaatggagaaagtgagctgagagccaccattcatccgtctcccgctactctgtgatgccatgtgactggccatctcaccctcccaccaccatgccttccgtgttgtgatgaacggtgtccccctcaaatcttgggccagaataagcccttcttcccttaagttgcttttgtcagatattttgtcacaaaaatgagaaaacaaacacaaactcttctgtattgagattctgtgagacttctaaagtatttggatctgcttctgtcaagttctttagtgactcccaaacacttaatttgtggttttgtcctggtcaatattcctgggacagatgtatttcagccagggttctttgaaagctccttccaggcaatcctgacatggagttgagaccggaagtaccctcttctaagctcctccaaattgtgtaaaatggtggcttttcaggcctggctttactccaagagagtcctatgcaagtagtatttggttggctccattttgaagagagagaatgactgtacctgggtggacacacggatgactccacctgttctgtaccacccatgtagctcagaccactaactagcttataaaagagcatatagtctttttttgtttgtttgttttttgtttttcgagacagggtttctctgtgtggctttggagcctgtcctggaactccctctgtagaccaggctggcctcgaacacacagagattcgtctgcctctgcctcctgagtgttatatcaggaagaccaggactgagacctcactggagacatcagactgaggcaaggaggcaactcacatggatcccatgaagatgaagacacctaactccttggtgatgatagtctctattgacttgtcatctgattgactactgtgtgtgtcaagggaccgacaggtagagaactccccactgtctgggggcttcagctcacctcagtccccactgttgatgaggcctgcttgaattgcctgccctccgtgcgtccatccaccagccttccttagatccagcttttcatcccattcatccgtctgcccattggttcctttatttgtgtggatctggcccagcccttcgcctctgcagcctccagctaagtttaagcctcaatgctacagtggcatctctagcagaactccaacacagtagctacctgacttcccatggagacgcctttcacgtccctgtcacttctgcctctcagctggcctctttgagattcctttaactcattgtagccatcctttaacctaaaaaaatctgtctgtctgtctgtctgtctgttgattatatgacatataatatgtgatctgagaatttatcttagtggctaagattggaaccaaagaacctggacttcccacggctagatagcaaggaaataagagctacttggcaaactgctgccaataaaactgctttatgagtttattatgaccttgtgggaagaccgggatgtgttcatctatgttcctgacacagtgaaagcatgacatgcgccttcagaattgaagtgtgcttctcatcctctcctttgcagaagatctccgcattgtttatccattctctgcctctatcatgtctctagggatgtacatctgtggtgctggtccctcacgtgagaatcggctcactagccgtcttccagggtgtgctaggcattctgccttccagctcccctcttaaggttggtgcctcgattttgtttcacctcacacaaaatcccgagctcgtggctgtgcaatcatcaatcctctcaacaatcaatcactttcatcagggcttgcagtgacctgatgtgtggtcactccctatgttctgtctatcagtgcctaggagcatatgcagaggtagagcccaggccacaatggcaggtgtagggccctgggcatggtttttgcttcttctgtctcttccccatcaaaagcacaccatgtcactgtattttattctattcaacttatgggggaatctatgtttatggtctttgatgaaggccctggcttgccaggtgataagacaccctctcagtgtgagaacctcactgctatttgcagcaatgcacagttccctgtagtgagaagctgaggtatgctcgggtacactgaagagatgaaaggaggccaagagactctgagtgctccagggagcctcagctcagaggccaccttcttctggacaacctcagagctcctcaggtagaccctgggccgactcacagcatagtcactgggcttttagctacccactgtcgcttaacacactatataaagagaatgactgcaggctcaccctctgtgagctgtgagggttggcaccctggaggtcttcatctcctattctgagagaacacagtaggcaccctgcttgtgcctgtggaatgactaggagttgtcactcatgcagggtctttgtgatcagggaggatctggagggttaggatcatggaggtgacaccaggaaagcagatggtaaggtaccagcctgtggaggtgtcccgtctttgggtactccgtggggccatgagcagcagccctccagaatcctaggtttgcatgatgtctctactcctttagagccaagggccctcacccagcctgataccacagtctcgtcgttctctggcactggatatttgcatggctttgaagggagatgtatggtcacctcacagtcctttgcccaggaactagctgtcctttctctccccatagctctgcagctgagcctgttcgtggtccagagtgacctccagaatcatcaggggagctgtttagaagtaacaggctttatgtaattggccagaatgcaggggctgggggcagcctcatttcttcagcttctctgatgttagttgcagccctgtttggaacagggtttcctgcccccgcagccagcagtcagcttgctttgatctgctccaagcagcagtcctggcccttttctctccagcagtgtctcctggttccttgccgtccctctgctcattggtgtgccctcttggcactgattttatatgtgtcccagcagactgctgccgtgtgaattacagagagcagagtcataaagacagctcccgggaaataaatgaaaaacaatcattcagccaagacagacagcagcggcagagagactctcagccccagagagggcctagggagggagctgagaggggagaaagaggctggatcttaagatgatgtctatgaaaataagccacccaggaggagggagggaggagtgcagggagcacctgccccgaagggtcccagtcatgattaatattgatggccagcctgacagggtctagaatcaccctggagacaaatctctggccatgcttatgagggagtttctagattaggttaattaagctaactgccagactgaatggaaggaaaggcaggctgagttaacggcatttagccctctctccttcctgactgtggacatgacgtgacagatgtgacagctgcttctgcccctgctaccaaacctcccctgccaggatgaacttcaccccttggaatttagccaaagtaaacttttcctaaacccccagtggggtctcgctctatggccctggctgacctggaactcactatagactgactcaaactcacacatccacctgcttctgcctctcaagttctgggattaaaggcatttgccgccatgccctgtagaccttcctttttcttaggtagtgattgtcaggtatttggttgaggcaacgagacagacaactgtgcagtcctcctccctgatgaccacctctgaggaagggtaggacagaagactcctgtcaaggagggtccagtatgcccactgtttggagcttgtgccaattgggcatgtatgatgttagccagataatagcggggtgtcagggggctggagagatggctcagcagttaaagtgccatgcaagtgtgaagccgggagctctagatccttagaacccatgcaaatgttgagtggatgggagtgctgccttcccatctgtatcacactggttctcagcctttctaatgctgcgatcctgtaacacagttcctcgtgttgtggtgaccccccccaccataaaattagtttcgctgctacttcatgactgtaattttgctactgttatgaatcataatataaatatctgatttcaaggatatctgatatgtgtgtgacccctgtgaaaaggtcgttcaaacccccaaatgggttgcaacccataggttgaaacccacagtgtaccctttggggcctgagtctagagttccttccctgaggaactagactcttgcctcacactcttgtgaccaggcatttaggacttctgtaggcaagggttctgtaggcttaccaatcaactttacttttatacagtgctaagtggtacctatcagcacccctggctctgggcagaggactgggacctgagtaaaaatattcagcatgttatctggggagccaagtgtaccttctgggggttcaatgcatagacttgatattttggttacattcctatttcataaaacaccatgactaaagcaacctgtaaaagaaagcatttaattgggcctatggttttggagggttagagtccatgatggcagtcaaaggcatggtggcaggaacagctgaaagctcacattctgatccacaagccggaggcagagcgagcgaacactgggaatggccagagcagtgattctcaacccctggattgtgacctatgggggaagaggtgtcaaatgactttcacaggggacacctaaggccacctgaaagcacagatatttacattacaattcataacagaagcaatattacactaatgaagtagtaacaaatataattttatggttgggtcactgaattaagaggttactgcattaggaaggttgggaaccactgggctaggatcttttgaaagcccagagccagccccagtgacatacttcttccaccaaggccatacttcttagtcctccataaacagccaccaaaacgagagactaagtattcaaacatatgagcctatagggccttctcattcaaactaccacacttggcctggcagaatcacagccccctgacctgacaggtgtgaggccctcacggcactcctagagggcagggaatgtggtgggaatgtattcctctgactggacacatctttagagtaagtacctgggagtttacccaggggctgccactgggaaagccagctactggccacagacccatttcatgtggagctctgtctgtggagtttctttgatcttgtggtgggagaatgttgtgggatttgtacactgtgtgaagaggattgttgtgattggtataataaaaagtggaacagccaataggtaggcaggaaagataggcgggacttccaggtagagagaggaagaggataattgagtcatgtgagaccaagacacaaaatgaattggacacacagaatgggagagaggaaaaagccccatggtagagtgtagatcaacaaaaatatggattaatttaagttataagagctagtggataacagcctacgctaaggacaagctttcataagtaataataagtctctgaattgttatttaggggctggcaatccaaagatagtctgacgagaaagcttgctacaggagagagctggttaggtgtggggacagtgagcaaggccttggggatggtgctacaggtgaagtctgacttgttccttgaccatggatggtgggtagaccagcagataccctttgcctttttcactgactagcccaagtggttctcaaccttcctaaggctgtgaccccttagtccagttctttacgttgtggtgactccccaatcataaaattgtttttgttgctacttcataactgtaattttgctactatcatgaattgtaatgtaaataatttttttggagatagaggtttagatttgtaccacggcacccagattttgtatgggtactggcggtttgaacttaggtccttatgcttgcacagcaggtattctactgtctgaacaaccactccagcctcagggggaagtgttgggaatttagtgttgggctgacaagatggctcagtgggtgaaggctcttgccactaagacctgatgacttgagtttgatccctgggacccatatggcaggagagaaatgactcctgcaagttgtcctctgacctctgttgctagctcataggttttggggaagccattgaatggtgaagattctgacctaatcaatcaaccccttgttggattcataatgtagatgcataattaggaggcgttagaaagtagcgggcaggaactagttggaggtgggtcatggagggcataccttggaaagatatgtcttgtcccttctcttgtctttttctgcttcctctccatcatgatctaagctgctccaccccattacaaatccttcttctgggatgatctgcctcactcagtgtccagaaaccccagagcccagcagcactggactaaaccctgaaactgtgagccacagcgtcttttcttccttttaagtcttttgcaggtatctgtcagaggaacagaatgcctgactaaaacactccccatctggccattcaaggccagcctgtgtgtgatctgaggcccagagactgtgggcagagcctgtctcccctcaggcagagactgttaatttccaattagctggagcgttggcaggcagctccaggctccagactacacatattaacgaaggcacagtcctggctggagacagcattgaatgaggagagaagtcaaattaggttcttctcatggcgggacattaatctttggttggcagccactggcttatgtctggtgggcatgggcatcccttttggtttgtagagtattccagcttcctcctctgagctgtggtgctgggatggggagttttacccttgtttacttctaatggaggcaagcaggaactacggcagagatgagggctttgttataccttggatttggggcaggaagcagggctccacagggtcctagggagtgggactggggctgcactgtctgttcatgagtagacaaagcaagagggctgaggatggcttgccctttggaatggtaagtgtgacgcagacttcattatggggagctgaccaaacctcagactccactaagcccatttgtagtaacaggtggaagggtaaccagaaacatccagttctccatttagaaagcagaatgatggtgacatgccctagggagatccccagaaagtccccagggagcatccttcactgtcaaaggcaaagccccagggagtgacagcttcccttggtcagccctagcctgtcagctgcagacaggttttcataaaacccaaggaaacatctgctgagaaaaatggaagtgtctccctggggagtcatatgcacgctctttccttcaccttctctaggctctgaggcgcctgcagcccaggccgggagcccttcaatgaaataccctggagggagccatcttgaagctaacctcagattttaaaagtcaaacattctaacaaagtgtaatccaaaaatatactaaactgatcctttgatatttacatgatagattgtaggagccagaatcaaccctttctccctaaatttgcttttgtcagggtattttatcatagcaacaggaatgtaatgaacagtactactgggcctttaggctgtttcagactttttctgtattgcagtggcaaactttctacataaattacgttgcatttgtgaacactattcctgtagcatcaattccagaaatgtaattgctaagtcagaggaatacatagtttcaaatttgattgatttgggaaattgtcctccataaccgtcttgcttatttgtactgcctgccagcaaatcctaagagtactgtttcccatatgtcaccagcaggctatgtgaccgagtgtttagaattccgtcattctgatagataaagggcatttgagtatagtttaaaagtttctttacagattgagcgtgttcgtgtgtgtgtgtgtgtgtgtgtgtgtgtgtgtgtgtgtgtgtgtgtgtgtgtgtgtctgtgtgtctgtgtgtctgtctgtctgtcttcacaaaagcacacatcatgtcaagacaaaaggaggcatagatggcttgccctattgcttgctgccttacccttgaggcgggtctctccctgaatctgggctcgctgttcttgcctggctggccggccggttgacgagtgtctcacatctgcctgtctcttctctcaacactgcaccatatgcattcatgattatgcttgattgttaagatgtatttttatttaattacgtatattggtgtatgtttgtgtggatacatgtcacatgtgtgtgggtgcctgcagaggtcaaaagagggcactggagcccctggatctggagttacataattatggcctatctgatatggttactgtcgaccaaagttgggctctctggaagagggctgggccatctctgtagtcccccatgtccagcttttttttttttttttgtaatttttttattagttcaaattaggaacaagcttgtttcacatgtcaatcccttctccctctctctcctctctccccatctctcccctcctccccccgacctatcccccaccccatccaccctccacacagggtagggccctcgatggggctccacaaagtccaccacatcctcctgggccaggcctaggcgctccccgatgtgtccaggctgagagagcatcccttcacgtgggatgggctctcaaagtcccttcttacacaagggaaaaatactaatccactaccagggtccccctagagtatggaggcctcctaattgacatccatgttcaggggtcaggatcagtcctgtactggcctcccagacagcagtctggggtccatgtgctccccctgtacaggccagctgtttgtgtgggtttcaccagcctggtaccaaccccttcgatcttcattcctccctctctgcaactaagttccagagttcagttcagttcagtatatatctgtgaatgtctgcctctgcttccatcagccactggatgagggctctaggatggcataaaaagtagtcatcagtctcattttaggggaagggcatttaggttatcctctccaccattgtctggattgtcagatcctgtcatccttgtaggtctctggatccctagtgccagatctctcctcagaactataatggctccctctaatatggtatctctcatcctgctctcctctattctttccccaactcaatatttctgctcctccatttcctcctcttctctcctcttctcctcctctcattctggcagctccctctctcctaccctcatgctcccaattagctcaggagttcctgccccttcccattcctggggtccatgcatttttcccttacagtccttcttgtttcctagtttctttggtgaagaggattataggctgctaatcctttgctctgtatctaaaattcatatatgagtgagtacataccatgtttgtctttttgtgactgggtttcctcactcaggatggtttcttttagttccatccatttgcctgcgaatttcaagattccattgcttatttctgctgagtagtactccattgtataaatgtaccacattttctctatccattcttcagctgaggggcatctaggttgcttccaggttctggctattacaaacaatgctgctatgaacatggttgaacatatgtccttgttgtatggatgtgcattattggggtatatgcccaagagaggaatttctggatcttgaggtaaactgattcccatttttctgagcaaccgccatactgatatccaaagtggtcttacaagtttgcactcccaccagcaatggaggagtgttcctttttctccacatcctctccagcatagattgtcattggtgtttttgattttagccattttgattttaggtgtgaggtggtatctcagagttgttttgagttgcatttctctgatggccaaggattttgagcactttcttaagtgtctttcagccatttcagattcctctgttgagaattctctatttagttcttcaccacactttttaatttcattgtttggtgttttggtggctagcttcttgagttctttgtatattttggaaatcagccctctgtcagatgtggggttggtgaagatcttttcccattctgtgggctgtcgttttgtcttacgactgtatcctttgccttacagaagcttctcagtttcaggaggtcccatttattaattgcagaccttaatgtctgtgctactggtgtaatgttcaagaaacagtctcctgtgccaattcgttcaagggtatctcccactttctcttctagaatattcagtgtggctggattaatgttgagatctttgatccatttgcacttaagttttgtgcatggcgatagatatgaatctatctgcaatcttctgcatgtccgaatccagttgtgccagcaccatttgttgaagatgctatctttcttccattgtatagatttagcgtctttgtcaaaaataaggtgttcataggtgtgtgggttaatatcagggttttcaattccattccattggtctatctatctatttttgtgccaataccaagctgttttcagaactatggctctataatagagcttgaagtcagggatggtgatgcctccagaagatcctttattgtacagcgttgttttggctatcctgggttttttgtttttccatatgaagttgagtattgttctttcgaggtttgtgaagaactgtgttgggattttgatggtgattgcgttgaatctgtagattgcttttggcagattgccatttttactatgttgattctacctatctaagagcatgggagatctttctattttctggtatcttcttttatttctttgtggatattgtgaagggtgatgtttctctgatttctttctcattggatttatcatctctatatagtagggctactgatcttttgaattaattttgtatgctgctgctttgctgaaggtgtttatcagctgtaggagtaacctgatagagttttttttgggtcacttatgtagactatcatatatcatctgcaaataatgaaagtttgacttcttcctttccaatttgtatccctttgatctcctttccttgtcttattgctttagctagaacttcaagtacaatattgaagagatatggagagagtgggcagccttgtcttgttcctgattttagaggaatcgctttgagtttctctccatttagtttgatgttgggtattggtttggtgtatattgagtttatcatgtttagatatgttcctgttattcctgttctctccaagatctttatcatgaagggatgttggattttgtcaaaggctttttcagcatttagtgagatgatcatgtggtttttctttttcagtttgtttatatggtggattacattgatggatttttgtatgttgaaccatccttacatccctgggatgaagcctatttgatcatagtggatgatttttctgatgtgttcttggattcgattcaccaatattttgttgagtatttttgcatcaatgttcatgagggatattggtctgtagttctcttttttagttttatctttatgtggcttgggtatcaaagtgattttagcctcgtaaaaagagtttggcaatatcccttctgcttctattgtgtggaacaatttgaggagtactggtgttagctcttgtttgaatttctggtagaattctgcgttgaagccaactggccctgggctttttttggttgggaggcttttgatgactgcttctatttcattaggggttatcggtcgatttaaactgcttatctgttcttggtttaattttggtaagtgatatctatccagaaaattgtccatttcctttagattttcgaattttgtggagtacaagttttcaaatatgacctgatgattctctggatttcctcagtgtccgttgttatacccccctttttgtttctgattttgttaattagcatgttctctctctgccttttggttcgtttggatagaggtttgtctatcttattgatcttctcaaagaaccaactctttgtttcattgattctttgtaatgttttcctagtttgtactttattgatttcagccctcagtttgattatttcctggcgtctactcctccatggtgagtttgcttatttttgctctaaatctttcagttgttctgtcagttctctagtgtgacttttctccagtttcttcatgtgggcacttagtgctatgaactttcctcttagcactgctttcagagtgtcccataagtttggatatgttgtgtctacattttcattaaattctaggaagtctttatttatttcttcctcaacccaggaatggtgcaattgggtgttatccaatttccacaagtttgtaagttttctgcaatttgtattgctgttgaattctagctttaaagcatggtgatttgataagatacagggggttatttcaagttttttgtatctgtggaggtttgctttgctaccaactatgtagtcaattttagagaaggtgccacatggttctgagaagaagatatattcttttgtgtttggatggaatgttttatagatatctgttaaacccagttgggtcataacttctgtaaggtcctttgtttctttgctaagtttttgtctggtggtcctgtctagtggtaaaagcagggtgttgaagtctcctactataagtgtgtgtggttttatgtgtggtttgagctttagtaatgtttcttttacaaatgtgggtgccttcgtatttgggacatagatgttcaggattgagacttcatcttgatggacttttcctgtgatgagtatgaaatgcccttcttcatctcttttgattgattttagtttaaagtctaatttgttagatattaggattgctacatgagcttgtttcttgggcccatttgatttcccaactctttactctgaggtaacacctgtctttgaagttgaggtgtgtttcttgtatacagcagaatgatggattctgtcttcgtatccattctgttagcctgtatctttttatgggcaggttaagaccattgacattgagggatattaatgtccattgattgttggttcttgtttgttttggatttattgttggtggtatcattgtgtgtgtgtttcgccctcctgtttcttttcgtgtctggtaaaattgtgttatctattgcctatgtttttgtgagtgtagttatcctcgttgggttggaattttccttccagaactttctgtagtgctggatttgtggatatgtattgtttaagtctggttttgtcatggaatatcttgttttctccatctatagtgattgaaaattttgctgggtacagtagtctgggttggcatccatgctcccttagtgtttgtaggatatctatccagaccttctggctttcaaagtttccattgagaagtcaggtgtgattctgataggtctccctttaaatgttacttggcctttttcctttgctgctcttaatattttctcttcattctgtaggtttgatgttttgattattatgtgttgaggggacttctttttgtagtctgtttggtgttctgtaagcttcttgtactttcataggcatatccttctgtaggttggggaagttttcttttatgattttgttgaatatgttttctgtacctttgagctgtatttcttcgccttcttctatacctattattcttaggttgggccttttcacggtgtcccatatttcctggatattttgtgttagggatttgttggacttgagattttctttggtcgatgactgaatatcctctagcgagtcttcaacaaccgagattctctattccatctcttgaattctattggttatactcacatctttagttcctgattgtttattcagcctttctattttcagcatcccctcgttctgtgttttctttattgtgtctatttcagctttcatgcctttaactattttgagtgttttcttcacttgtttggttgtttttttattggctttctttagattttttaagagatttgtttacttcttgaattttttggtttgtcttttcctccatttcatgtaattttttgcttgtttttttttcttctatttctttaaggtattttcttgtttcctctttaaaggtctctatcatcttcctaagataatttttgaggtccatctcttcttcatcttctgtgttggacttttcagatcttgttggtgtggagtccctagattctggtggtgtcatattggtttttctgttgttgagtggttttttttttgtttgtttgtttgttttgttttttgtttttttgagacagggtttctctgtgtagctttggagcccaagtgtgtacttactctgtcttcttcccatcccttcttccagtgagtgcaggtggggtctctccccctctctggtggcaggcggagggctcagcctttggcggcagctggaaggcagagggcagtgggtagacaagggtggggtgtgtctggactcagggtgggccttcccggtctgggcaggtccactcttgtccgggtgggctcaggcagaagtgagcaggggctgatgggggagtttggggggggagcagagcagcgcccagactcacctgagacttgggcaccggctgcaggacagagggcagagtgtggacccgcgtccagctttttaaaaacattgtgtcctatttagttttagttcacacctggaaagaaggactctcaattgaggaattgtctccattgaattggcctgtggacatctttgaaggggcattttcttaattgctaatagatataagagagcccagtcccctgtgggcactgccacccctaggcaggtggtcctgacctgtataaaaaaaggaagtgagtaagccggtaagcagagctcctccatgctctctgctttagctcctgcttccaggttctagtctagtcctaccttggcttctctcagtgggtcatgatgtggaagtgtaaatcaaataaataaacttttatttctctagtccttttagtaaagcaacagaagacaaattaggacactattttttggtatttgaacccaagtccttgtgcttacacagcaagagttcttacccaccaagccatcttcccagccctgaactattgtgcttatgtaataacaaaatgtactcacctagtcgtgtaggcttaagaattggtaaatgtagattaccatgtgacctgacccagtcaagtcacggaccatttccacctcccatgctatagatagtctgtgctctggctgattttgtgtgccaacttgacacaagctagagttattagagaggaaggagcctcaggtgaggaaatgcctccatgagatcccgatgtaaggcattttctcaattagtgatctgtgggggagggcccagcccattctggatggtaccatccctgggctggtggttctgggttctataagaaagcagatcgagaaacccaggggaagcaagtcagtaagcagctcccctccatggtctctgcatcagctcctgcctttgggttcctgttctgacttcctccaatgatggactatgatctggaagtataagtcaagtaaaccctttcctccccaacttgcattttggtcatggtgttttgtcaagtttgaacgtggtttgtcccctctgacactcctactggagtttactctccattgtgccatactgagaaggtggaagctttatgctgcttaggggtaaagcgtttgtgaagggattgagatgagatgaggttctcgggttggaaccaccatgatttgaacacaggtggttttctgagacatacaacagaaaggagttgttcttgctctctctagcatgtgctcctactctttcctatgtcttgccatgtgattccttgctctgctttggagactctgccattaagaagcccatccattaacatataatagccatggccttggatcagggccatgaggcaaaaaggaccttctttctttacaacttcaccatcttatgacagtgtttagcaaaattaaagcgactgagacaccctgaagcttttacctagatcccagacaactgacacctctctaccctgtctgaggaacccactgctctgatttctaccaggagaggttagttttgcccactctgcggtttcatggaaatgaaatacagtttgcactcttctttggctaacttcttttgctcactgtttctgagatccacccacatgacctgcacatgacgtcggaagcttctccttcttcttgttgcccacaggaattccttgaatgaacataccaccttttgtgtttggctccatccaaagaaaacaacaacaaaaattttccttggcacttaatatttttattaggatgaatcttgtccaaaaaatgtgacccagaattccttttgtccgtgccatcctctgtgacccacagtgtattgcaaggctctgtccaggacttgtgcagtcattcccagttaccagatgggtaggattagattttttcttttctaatttcatttgcttggatttggaggaaaggtgttgagagttataacatacacacacacacacacacacacacacacacacacacacacacacacgatgacatgatacaaatctagtctttctagacagggaaccaaggtcagaacaaagtaaccatcccaccaaagtccaacttggagaaccaatgagtttattgggcttacttacaggagtgtggttgagtgttcttacaagagcctggatgctgcacaggtggctgcaccaccagagagccccagcatgggtgaaacatgggtgaaaaccaaagctgcatccccagagctctctgaatgactagcaggcaggctggctcttacagactctctgctagcaattggtcactgcttttatagtcttcaggaggggtgtcttagggtttctatttctgtgaagagacaccatgaccacagcaactctttaaggacaacatttaattggggtggcagctgacagtttcaaaggtacagtctgtgatcatcatgtggggagcatggcggtgcacaggcagatatggtgctggctacatcttcatcagaaggcaaccggaaatgagctgtgtcactggacggtatcttgagcataggagagagacctcaaagcccatccccaccgtgacacacttactgcagcaaggccacacctacttcaacaaggccacacctctaaatagcacctcgccctgtgggggccgggccattttctttcaaagacccacattcaattccctgccccccaaaggcttgtagtcatattatggtgcaaagatacattgagtccaacttcaaaagtccccacagtctatccgtctcaacaatgtttaaaagtctaaaagtctaaagttctttttttttttttttgattgattgattgtatacgatgttctgcctacatgtatgcctgcaggccggaagagggcaccagatctcataacagatggttgtgagccaccatgtggttgctgggaattgaactcaggacctctggaagagcagttggtgctcttaacctctgagccatctctccaggctccaaaagtccaaagttctaagtcccttctgagattcatgcaatctcttaactgtaatcccctataaaataaaaatacaaaagcaaatcacatacttccagcatataatgccacaggatatacattgccattccaagatacagggaagggagcatactgagacaaatactggaccaaagcaagattgaaaaccagctgggcaactccaaactctgcattccatgtctgatgtcaaaatgctcttcagatctccaattctgttcagctttgttgactgcaacacttctttctcttgggctggttccactctctgttagcagctctccttggcaggtatcccacaactcgggcatttctaatatcttaggatctccaagttgatacactgcttcaacatcacagcttcacacaatggcctctctaggcctccattcagggacaccctgacatatgcttggcttcagtggctttccttacgtgtagaggcaaattctataactcttttcttctatccttaactctaaagtcagaatcacatggccgaaactgccaagttctgctacttgctgggactggaacatgcccccttcctttaattatatcttcactggctttctggttttcattgtttccttcactgcttaagcttttctgtccttggactcactctatagaccaggctggcttcaaattcagagatctgctagcctttgctttctgagtactgagattaaaggtttgccccctcacacctggctctgagatttcctttaattccttttcacaagttggaaatttatctgggtgggatcttgacctgaactcactacccctttattgtatctcttaatctgtttatctcattgaacatagaatttagctctattttacttcctggtgctccatttttttcctcaaaatttacattttgcaatttaccctacttagtctgctccttttcattataaatcttcattagagttaccactaataaccacatgacagagtctatattaagctgttttgacatttcctctgccaatgggattaatccaatctcttcactttacctcaggcagactctttggacaagggcaaaggcagtcactttcttcaccagaatatcacaagaacaatctcttggcagcatactaaaattcttctcctctgaaacctcttgaggactctagtccctcacagttcatcaaatcacactgagcacctctgtctcccatgctcctactgggatggcccattaagcagtgcttcaagctttccactactttcctaacccaaagtataaaagtccatattactccaaacaaaaacatggtcaggcccatcacagtaatatcccactcctggtagcaacttctgtcttagggtttctatttctgtgaagagacaccatggcattttctttcaaaccactcaaggggacttgtgagtcttgtaagtttttgaacattttaagtttccttgactttctgtgatgtatgatgagctgagcttctcttttccctccaggagggaatgtttcaattaggaaaaaattgctaaccccccaaaaaacaaaaacaaaacaaaacaaaacaaaaaaaccgcaaaaaaaacaagcaaacaaaaaagcaaaacactagaaaggggaatggggaataaagcctttaaaaacccaaaccaataaagtttgcactcctttgccccctacaggctctgttggcctcagaatgtgaatgaggtcattggtggatctggcagaggccttttcctggggaaggaagagttaagaactcatgcctcctctcccatacttgagaactcccttgctcactaaacccatttcccttgaggcaagaggtcatgggccaggggctctggaatccaccggcttatgtgtgaacagtagctcccagccagctatgctgtttggggagggtatagcatcttcagggggtggaggacgtgagtggctgaggggctggccttggggaactacagcctggcctcgtttccagtccaagctttctgtttcccgactacctgagtggtaaccagcttcctctggcttcttgtgccacaactacgagctgcttctgtcaccacatcatctcagctctggtgggctgtgttacctgacccctgtgtaaaccaataataacattacctgttgagtgttagttgtcatgaaactttttctggctggagtgccaggcagtgacctacatggaggagacaggaagcagagaggagacaggtgtgtgtggggaatcctaacttgggcacctgctgtcccttctgggggctcacatcaggcagctcatggccacctctcttcaaagacaggaaagtgtgtcttctcttcactaggtaaaatgtaacagcagaatctggggaagcctccagctgaacgctaagcaaagtctttcgtttaatgcatctaagagatgaaatctaactttctttctaaaattggcttctatacattgttgtatcagctgttttacccaatctgttcccctattttattcctggcttagttattgaagtattttagaggtatttttttgggggggatactcatatctgatcattttccatttagaagaaaggttgtaacgttttattaatttattgtattttatgtgcttgggcattttgcctgcatgtgtgtctgtgtaccatgtacctgcctaggacctgtagaagcccaaagagggtgtcagatctctggggagtagagttacagatggttgcgagccaccatgtgggtgctgaaatcaagctagatcctttactgtgccatttctctagccccagctgcagcagttttaattggcaaagatttgatagtgggagaggaaggctctggtgttcttgggactggctttataataatgacactgaagtctttttctttaacactggtttatttgtgtatgtatgtgtgcacatacgtgtgtgtgtggggttaccatttgaggaatccattctttgtttccaccatgtgggccccgggaatcaaattcagcttattagctatggcagcaagtgctttgctgagctatctcatcagcctgagaataatattatacttgctctgtctagcaacctaaccgtgcttacccccccccccccccatagcctgctaccttcccttccctggagcacgctgtctaatgccacactgggaaccacttcccatcccccctcttactgcctcacctctcttcctttgccctttctgctggctttggagaagccttttgaatggggaagaaaggaacttataagctagctccttcgtggtttcgttgctgggatccctgttccctccctacattcagagtccagctaaataactctgttaaagaagaggagtgttgccgggcgttggtggcgctcacctttaatcccagcactcggaggatctttgtgagtttgaggccagcctggtctccagagcgagtgccaggataggctccaaagctacacagagaagccctgtcttgaaaaacaaaaacaaaaacaaaaaaataaaataaaaaggagtgtcttatgttctgccccaggacggtaaaccaggcatgcttgtcttttcaaatgacctcagatggagggtgccagtcaggaagcctgtggctacaagtaacaaaagcagtagagagagctcctgctgtggcactgaagcaaggctctgagatgagacgatgacagaggggccacatgcaaagattaaggatgattctcagctggctcttcctctggtgatggctcgagcaagatggccatccatgtccagcaacatgtgacatcattgttgatggttcacaggaagaaagtgatgctgatgtcccaagagacacatggtttactggctttggggatcatgaggacatttggactaaatcagaattctgtcaagaaggaaagagaagaaatggctgtcgggtgggtaatgagtgacatcactggagatgtgttcttctttaagggaaataaagaatttattctggcctaggaacatggattcaaattacccctgagtgatgacatccactacaaagaggttgtgtggactttcctaggcacagagcaaagtcataaatcaataggttaaccagtgacatcggtgtgagctccaggcagggggggttctgggaaggcaggacgcaacctcttctgtgggtttcagatactttctgaattccattctgggctttaggatgcacagaggctggaggtctgtgatgctcagggattcattctcttgagttgtatctagtcatgtctaacctgtgaggtcagggacatttggtgtaatgtttcactcttttgcctttttgaggggcccaccacccagctcccaaataaatcacacatggaggcttattcttaggtatgaatgcccggccttactttggcttgttgcttgccagcttttcataatgttaattatcccgtaggagcagcaagagaacaaggagaggaggacatcagaggtcagcaacccagccacccccgtggagtaagaaggaaaataagacatacagaagtaaagataaaagcccagagggaaaaggtagtcgggataatttaagaaaagctgactagcaacaagccaagctaaggctgggcattcataactaagaataagccctggtgtgtcatttgagagctgggtggtgggcccctcaaaaaaagtcaaaagagcaaaaaaaaaaaaaaaacaacacacataggaactgaagttgagtaaatggctattaaaggggtttaaggatactcggctgatgtgcaaatccatctctcttcacacagacggagcctcttcacaggggtttggttcacagttctccattcttctctttcttggtggcagtcttccaagtcttttgatgaaatggacctgaacgatgaaagtgatttgaatacagccacaagaagacgggaagtacctggtgtgcaagtatgtaaggatttctttctataatttttaaaaaaaatttttggaacaaggtctcttgtagtccaggctgacctccagctcagaatgtagctgaggatgacccgggctcacgattctcctgccttcacctctgaagtgctgggattataggtgtttatttattcagagtcccactttgtagcccaagctggcctcaagctctcaatcctttgggcgatactttcttagattttggaatgctggaatcataggtgtgtgcctctgtgcccattgattaggattctgaagcccgtggctgtctgttggagagggtgctgtgatctgctgaaccgatcatttctcgtctgaatgtgagtcatcaggtctttcttaattccgtgaaaacaagctacgtgggtatccgggaccatttgtctcattttatattttttccaatttaccttaattaagtttcctcagtagatattcttatgaagaagataatgttcagactgtctaaagtctaatcttcatgtaaattaaatataaaatgccatcttcctcattctaaatgaataactagttattcagtttcctcaagcaacttctttggaattttggtaaaattggtttgccaaaggcctggtcagtcctggtgagctgaggacatttggattcctcaagttgagaaatcagagcaaggagataaagtacatcagcagaactagatcagtgaaaaatgagacgccattatcttgactgcgattgtgaccaatggtgtgaggctccatcgaccacaacaagaagaggacctttcctaaaaattggtcttcatcatcctgactgttcaaccaggcttgagagataataagagacgtctgggtattgtccaggcacacactggtgtgcgttactttttgttgctgtgatagaatgccagacacagacaacttaaagggagaaaaggtttattttattttggctcatggtttcagagggttcacctgggattggttgtttggctctgtgtctctgagcctggagtgagggaggaacaacacaacagtgagaacgtgtgtcagaaaccattcatatcatgatagaaaagaaggagggaggaagagagcgcgagcccccattccccagtgacctagtgtaggcatcttgtctgtgaacatgtaatagtggccacacccacctttgggcgtggcctcaggcagatggaagcagaatgatggaagcttgaggcgtggctttcctttgctggtctttctgatgggtcagcggatccagtaggttgggcggggaaacattctagcggttctttgcatttttctgtgtaatttttccctaataaacccccatttatcatttatcttgggtctagtgaaataattacatccttaccttcaatctagcctccagctagggcccacctagggctcaggtttctacagtctttcaaaaatagcaccactgccgggcgttggtggcgcacacctttaatcccatcactcgagaggcagaggcaggtggatctctgtgagttcgagaccagcctggtctacaagatctagttccaggacagcctccaaaggcacagagaaaccctgtctcgaaaaacaaaacaaaaaaacaaaaacaaaaacaaaaaaatagctccactagttgggggccacgactcaaaccaggagcctgtggaggacatttcaaggtcaagctgtaacggctttggaaggtgtggggctggagctgcaggaaccgactgtgggtgggactgtgcggtgacctggccctattgccattatcttggctgccttttgagggcaactggacgtgcagtggtgtgttaccttccctgagtaagccaaagggtgtttatttatcactgcctgtgtggatgccttgaagaaacaggaagctaacctcatgaattcatgctttcatattattagaacttctgggtttgacaggggaaaaaaaggttttgtaaatagaaattcaacttgcttatataacacagctgctgtcagtttaggttcagctagatccagctgctcacagaaggtcctcaggatctctctttccaagtggccccattcactcctgcttgtattattggtatatagacatatgccccccaactcccaccccacaccccatgacagctccagggaggagagcaagtctagctcactatttaaaagtcaattccaaagacagctacgactggcagtagttacatgctctttcctaaatcacttgggtaggaagataagggacactgatgggtttgttgtttttgcccagacacacggccatgttctgcttttaccactcaggttgttttgaaccccgtgcagttgcttacaggaggtgccattctaggtgtgcagggagccaggcagacgtagttcttgtgctccaggtgtgtacaagctctctctgactggggcaaagcttatgagggtccagtttcattgctcagtctcaaaggggcttgttggaaacgggggggggggcatttgagaatagagacatgagattgacgctttgagttttggctgttctaaaagggactgcaagtgtgtttgtgtagcagatgtatggattatatgactcagcaccaatcaagagcttggtctgaatcattttatttgcatcagtgaattatggtggcctaatttgtgtatctatcaaacccgtaaccatgtgggtagggatgacagagccaacaggaacaatgatctaatgtagtctcagcattttgcatatatctccatcacagcaatacccctatggacaccaaagtcagaaagggacttccccgtgacggcaagtaatttgcaagttccctggcaagatgcaagatcatggcatctttgtgctatgttgactaaaccaaccctgaacccttaatgccctctggcggatatgttcttatgggatgtagaccacaagtgagcctggggtgctactttgggggaaagctcagcttgcttacaaggtgacaaagcacatcccacatgcctacaggtgaaggctctgttggccctttacccagatcctaaaggaatatgtgcatgttttattgatttattttaaaattttatttatatatgttgtcactggtgtgtgtgtgtgtgtatgtaaggaaaacttttgggaattgattctcaccttccatagtaggttgctaaattctcaccttccatagtagggactaaatttggattgtcaggtttgtatggcaagcacttttatcaactgagctgtcttactggcccatgtaaagtggttatattattttgtgtgtgtgtgtgtgtggcctgtttgtgtgtatgtgcattgcatacatgcctggtgcctacacacatcaaaaaggtatcagatctcctgggactggagttacagatggttgtgaatttctgtgtttgtgctgggaaccaaacctcagcaaggttctcagcaagaacaacagttgctcttaaccacggaaccctgttactatttattattattaatgtttatgtcagtgtgtatgtgtgtgtccatagggtcagaaaagcatattgggtgccctgatgctattgtcataggtgtttgtgagccatctccagcagagagcaggaactgaccttggggttccttcacaagagccacaggtgttcttcagagccgtctctccagcccttgtgtgtcctaaatgaggtgattgctaagataattttgtactagatcataatctttgttatgttggacaatctaacaatggataaataatttgcattgtctaagctagtgattgcagtgggctgggtccccggaggttgatctacaccagtcccgcccggctttgactgcttttctttctcagtcggggatccatgctacatgcactatgtccagctaaaggatactctttgaacacgagaagcacgccatggagagaacaaaggttcactccacaggggctagctggttcatcctgagtgctaccacagagcccatgctgcctagggagccagcaacacaaagtccagaggctttgtgcagtgcttctgggtgttgaggacacagttcttacttcctcgcttgctcctgtgcaagtggctaacataggtttgtaacttccacagttttgttttaaatatttgttttagatttattttatgtggatgagtgtttttcctgcatgtatgtacttgtgccttgtgcaagcctcatggggcattgtattccctggaactagagttatgggtaattgtgagctactgctaggtgctgggaactgaaccctggttctccacaagagcagctggtgctcctaactgctgagccatctctccagccactgctccactggttttattattttccttcaaagttgtttatcacagtcatatgcatttagaatgccctccatgtttgtcatcaagtcaagcttcagaacagggagaggggctgtcatttcagatcccagggtactggagcactcaaggtaaggggctggaccatgctcacacagcctctggaagctgaattatatacacgagccacccaaagctcatcaccatctaactggtgaggggagagagagggagggaggaagggaaggaagaagggagggacagagaaatagaattttgatcagacctttggcaatattttagtacctggaggtttctagagagcagaaagtagcctttcaccttggccatgctctctccctagggacttagtggtacttccgtgccctgtacctcagccacacattggaaggaagaggtacaaggttctagcttgcaacaggcctttcccctttctgtattttttccatggaattaggatcttttgaagactccagaactcttcggggcctgttagctggactgtgcctgtttccctcattagcttctgagcttgcagagtgtacctttacaattgtagcattgatgagcatacctacagctgggtggctgcactttctctcagcagtctgcattcattcattttaggagtcccactaattctcctggaagcctccctaaaggccccagtgtcaaccttctgatagctctttgaggtctggaggatggaggaggcaacccagcagaatgtgtaatttgataaggacagattcttttctagaactttccagctcaacccagagcctctggctgagtgacagcagcttaacaaaccagctagagacttttctggtgccacaaaatcctcagatgggggttggggctcactccatatttgtcccagaccctgttatggggaggggaacaaggcaccatccatccatccatccatccatccatccatccatccatccatccatccatccctgtctccctattgttggaacactgtggagcctagcccaggcccagtgctcactcccgctccagttaaagtgttaaggaaaagtgaagcagtttcaaagagtaggtgtgtgggaaatccagaaaggagctctgcacgcacgttttggaaacagtactgcagttggaagggagataatgacagccaaatgaggctgcatttgcctggtgcaagtgagatttgtgctcagcgattatcaaaggcctttcaggcacatcaaccactggagacaaaacctgctttccctggaatgtgaggagggccgggattgaaggtaagcaaggaataaatagagatgtctgtctcaaagtctgtgcaggagtatgctaattgtatgtaaaccagatgcaaatgaacccgggacctcattttactcttgccctatggccctgggtgtgatattatgatacatagttgttggttttcatccatagtttctggttcataatcttggtggaccttgtttgataatggtttgctaacaccttattccatgagggtcctgctctccagagtggagaaggaatgtgctaggctttccagctcagtctgtttggcaattatgtgtatgatgaaaactccataaaatccccaaaccactaggtttggagagcttccgggtagctcagcaagggttgtcctaaaatgtggtgtgcctggagagccagggaagcactgggcttcatcccctcctttgaaaagtcctctctaatgaacaggtaggaagtgcttgcatgagtttcatgagcctctcaagcacattgtttggacctggagggcgggttgtagaaatcctgatgtgttagttttctgttactgtaactgatataaatcaacagatataaacagacaaatcaacctatatggaaagaaggtttactttggcccatagttttggaggtttctgcccatgaccagttgcttaaccctgatgctttgggatactccatggtgagagcaaaaaccaagaagagagtggggtgcgaatatttcctcagtgacctaaaatatcccagtaggtcccacctcttaaagttttaccacactctagtagcacagcagaaccaagcctctgagggacgtttcagatccaaaataccactcccaactgaaagccatgtggttagaagcacagataaaatgacctggggagtggggccggagagatggctcagcaaggagcatggggacctgggcttggttccacaagtatggcagctcacaatcatctgtaattccaggcaaaatgatatactcttctggtctccatgggtatcagacacatgcatggtatacacacatacatgcaggcaaaacacacatgtaaaataaacatatatgtgtgtataacaacaatgaatgaatagacagggtgtgaagttgaaggggagcaaggaggactacatgggagggcttgagggagggaaggggatggggaaatgtgactgcattataatctcaaaatataaaagaagcaatgaaagtttaaaaaattttaaaaatatataatttggggaatactggcatctgaggtggggaggggtgatttgggggaccaagtcctcaacttatgggatctgacactatctccaagcaggcagtgtcagaagcagactgggttagaggacgcccacgtggagcctgctggcggagagaaatgcctgagccttccgaggtcacagaagggatctgggtgggaagtgtgtggtaggagaaactggagttcagattgggttttccttccatgtgatcacaccagggagagtcaaattaaatccagcgtgcccagagtgtctggcagatcagaggagggcgccttgaggatcatggctaactctgtgatttgctgccggcagccacaactgggccatctgagctgagttagcttttccagaagactctgtcttgtagtcagtgaggctgatcttagttctgttctggttccctattggacagagcagccttgtggatggtgggtcagggcttggctgtaaggtttgttttcactgttcatagttctaccctgtactcagtagctttggtgtcctgcatgtcaggggctaacactctggtcctagtcagggctatccctcctctgggcctccacttctcaactagggggagatcacagtgagtctctcctttctctgtcaccacccagaagggatgaggactgatgttgtctccttcctgcccaccctgcccccttcccgaagccattagagtagcaagttgggcataagaacccaagaagttcctggataatctcttattacatagcctttgtcaatctcgagtctgcaaagcgctttcaggtaatagtaatgacagcagcaataacttgtactcagagagggtttctgctctcagggctctcctatctccattatctcattttaaatagatgattctgccgaacggaggcaaacatggggaagggatcagggagctctggggtttgtagcagtgctggcgcagtgctgggactctctacactggttccttctggacctatctggacccctggataccttacacctgacaccagttgccttacttgtcagatgctgaaaatgagagtcagggctctcagagggtaaaggagcttgccgtgcctgatgacctgagcccaattcctggaatccatgtaaaggtagaaggagagaactgactccaaaagttgtcctctgatccccatgtgtgcacatgcgtgctcttgggcacacacacacacacacacacacacacacacacacacacacacacacacacacagacacacgacaacaacaaaaacccccaaggtttaaaaaaaaaaaaagtgagccaaagccaactcagttccttccctctccctttttttctttcccttccttctctcccctttctccttccttggaaaagagacaggtataaatgaatggtaaaagccacttgatcctacatgaactatctaacctggggtgtctgaggaagacagacatgaacaggttaataatggaagggtgtttcaattctttactcttgcagaatctctggaggctccgatttataattccctgctggatcaccagtcactgcattttttagtgtttcattctgtcagctttctctggaacgcttctgagagaatgcccccctcaacgttgccagcccatttcctcttctctctttcttcctgacatgtagaatcttgtacttagcagaactctctcagcctagatttgtgtcatacatctctcatgcctaagcccaaaggacggtgtgagtggaaaagtatgcttcaggcatttctcaggcaaagacaactacatccgagtgtctgcccagccaacagcaatgtcaagagcttcatttatgcaatgatgatgaacccaggggctcacacttgccaggcatgctctcaaccctgggaagccattttgattttactatcaaccctcctcctcgcttaaggaataggacaatacagctaggaccggtgacataggcctataattccagatacttcagaggttagcaagttcaaggtgtgcctggacttcaaagtgacttcaaggccagcttgaggaacttgtcctaagagagctgatggtgcagctcaatggtggtacagcatttagtctaaagagaaacaggctggccaggcgttggtggtgcacaactttaatctcagcactcaggaggcggaggcaggcagatctctgtgagttcgaggccagcctggtctacagaacgagttccaggacaggctccaaagctacactgagaaaccctgtctcgataaacaaacaaaccaaccaaccaaaaaaaaaaaaaaaaaagaaaaaaagaaacaggttgaccctgagtgtactgaatgaaggtgtgtgtgtgcatgtgcgtgcatgctaacttgatgagtatatttttgtcttttttgtcctgcaggcagctgctctgctgagaattttgtttgtccccctgttttccccactggttaccaaatatacatcttgtgcaatatactgttttgtcttatttttaaattgctccagaaatggaatgctatcatatattttcttttgtaacttttaaaatgttattttggcagctttattgaggtataactcagataccatgtaattccttcatttgaaatgtacattttattggtatttagtatactcacacatctgtatttccatcgctagtcatggtagcacatacctataattctaggacacaggaagccaaggtgggcaattgagagttctaggccaacctgggctatatattgaaaccataaaggaagtaagaaggaagaaagggaggaacagagggaaaggagggagggaagaaaaggagggagggagggagggagggaggagggagggagagagggagggaagaagaaaagaaggattagggccagtcagatgtcttagaagataaagtatggcatttgtcactaatcctgatggcctgagttcagtcccaggaaccaacaaccacaagactatcctctgtctcctcatgtgtgcccggcacgtatgtgcacatgtacacacacaataaaggaagaaatataaacataaaataaaataaaataaatataaagaaagctaactctcattcttctgtcctccagtccatcctagcagggtaggcatggtggccgggggctggaggctgctgctcatacatatatatcatgcagtcaggaagcaggagctggggctgggcgggctatgaaaactcaaagccacccctagtgacccattttctctagcaaagttctaactccaaaagatcctacaaccttttcagatagtgtcagtggctgaagatcaagtcttcaaatgcattggcctatgggggacacttcacatccaagtagtggtacatgaccccagtcactttccaaagcccctcttctgcgcgccatagtcaggctaagtttctatcctgtttcaaataaagatgaagatcaaggaagacatgaaaagtcaacctctggtctccacagatacgtgtacacatgcgcactcacaccaaagtaaatataagtaaacaagtccttacctaggtgtgtaaatagatcgcttgtctccatgtacagtttatttctcttttaaaattctttttttttatgtttatgggttttttttcctgcatgtatgtctgtggccttgtgcatgcctggtgcccagagaggacagaagagagcgtaggagtccctggaactggggttactctatggtgccgacttaggagttgggcttcctatgataaaggaaatgttctgttcagtatcttatatagttcagtctgttctgcatgtgtgttcatgcgtgtgtgtgtgtgtgtgtgtgtgtgtgtgtgtgtgtgtgtgtatgtgtgtgtgtgcatgtgtgtgtgtgtgcgcatgtgtgtgtgtgtgtgtgtgtgtgtgtgtgtgtgtgtatgcatgtggagcctgaaggtcaacacccaatatttttttctattgttatccaccttattttctgagtcagagtctctcaatggaccaggagctcactgatggaccaggagctccctgatgatggaccaggagctcactgatggaccaggagctccctgatgatggaccaggagctcactgatggaccaggagctcactgatgatggaggaggagttcactgatgggccaggagctcactgatgggccaggagctccctgatgatggaccaggagctcactgatgatgggccaggagctcactgatggaccaggagctcactgatgatggaggaggagttcactgatggaccaggagctcactgatgatggaggaggagttcactgatggaccaggagctcactgatggaccaggagctcactgatgatggaccaggagctcactgatgatggaccaggagctcactgatgatggaggaggagttcactgatggaccaggagctcactgatggaccaggagctccctgatgatggaccaggagctcactgatggaccaggagctcactgatggaccaggagctcactgatgggccaggagctcactgatggaccaggagctcactgatagaagcagttggctggaatatcatcttcacagacctgagttcactagcctctgagaatacttgggaacagagagtaccacttcaccgatttggccttcatgtttagttgaaatacaattgcagcaaattgtgtttatttctttttcacaggcctggatttagtagtttttgaattcatcctctaaatgtacgtaaattatccatgccagccctgaatccagcagtttgggtaaggactgtgatttttcctaagatgactgtaatttttgtgggagggctctgtgccacctcctacaggcagtgactctctgggctgaggcccaactgaagattcaagcgaggcatgaaagagcattagctaaatccacaggagcagtaagaactctttagcaagcagaagaaaaacagttgatggtctctgttctgcacaattcaacagctatgttggataacatgcaaggttctgggagccacactgcctgagaaggaacatcacaggacatgggaggggtcgcagggcgagttcacagtccagagcaggacacaccctgctctgcctctgctccccattccatgttacagtatcagagaggttgtcttgctgtgcatcctgtggaattgaacccccttttacatgaggcagtgccccatagagaaacagaagcatacagtacacaggaatcttggggcaacttcactgaaaggtgagagcagggtaagaaacctaccaaggatgtctgggcacctaggtagtggtcttcttgagtcactctggacagttctggctgagggggggggaatggagggcattctctctctctctctctctctctctctctctctctctctctccctctctctctctgagatagggtttctctgtgtagctttgtagaccaggctggcctcgaactcacagagatatgcttgcctctgcctcttgagtgctgggattaaaggcatgcctggcacggaaggcattcttgagcatgaggttggagccgggtaaaggagggacttcagagttggaccacagtcttaggaggatgtaactcttcagagcagagatgagaggaagctggagaggggtgggggtgggccaatgggagtggtgattcccagacttaattcgcttcctgccagtgatggttgcaactggcttatactggttcatgagggcctgctctttccagttctgtaagtcggtcatttgaaatctctcctggtaggagtatttataccagagaaatgggcaagtgctgcagagcagggcatcattgtgtttgttttgctcaccagagctcatctcttcttccctcctctcattggccaaatacaagaggtcagagggcaaaggagcttgggtgatggactctgtcaaggggaagagaaagggaagaagggaagaacaaccagtacacccatgccaacaagctctgggctttgtgccctcatgtggtggccactgttccatttgcattgtgtgtattttatgtggaccctatgtgtgacttgacactgtctcaatcacttttaagtgtacggttaaatggtattgactgtatttacattgctgtgaagccatggacactacccacctctgtagataattcttttttagcccaggctggcctcgaccagtttatatagctaaggatgaccataaacttcccctgcctctgtctctgattgctgggtttgcaggagcgtggcaccaccacacccagttcatacagtcctggggaggaagccagagcagccgggatgcattactaaccaaggtgtacccctagcctcgccagagttctttccttcatgtaaaactaaagcaccaggcgtgatggcacatgcctgtaatcccagaaggctgagacaggaggacagagtctgaggccagcattagcttcacaatgaaactgtctcaaaacaccaagctgccggcttggtggtgtacatctttaatcccagcacttgggaggcaaaggcaagcaaatctctgagtttaagaccagcctgatctatatagcacatttctgaccagccagggctacataacaagaccctgtatcaaaaatcaaaagcaagcaaacaaacaaaaaacccaaccaaaacacccgttatacagcaattcaactcctatctctcccttccttacccttggtcaccactgaatgctctcggtctctctaagtctgactaccactctaggtgtttagcttgacatgaccgccaccatcttaaattgtcaccacagagaccaccctgggataaccacattccagttagcttttccttcatgctttcctggaaaactataaatagaacagagtgtgagctctacagctaaaccctggtgccaggaatgtgtctaactcagtcattatcttgagataaaccaaatacactccatctttatgaattcacttttgtcctgaccaggttatatgacctaatttccttctgtttgttttttcaaagtgattttattattgctttatttattattgtgtatatgtgcacagtgtgtgtacatataggtgcatgtgtgtcatagcttgtatgtagaggccagaggacaactctgtggaattggttctatcattccaggctctggggaatcaaactcaggtttccaggcctgagtgacagaggctttgtccactgagcccttagtttggttctcagaatccacactgggtgtcttgcaactgcctgtaaatccagctccaaggatccaacatcctcttctggcctccacaggcacctcccactcccaatatacacagaaatagaaataaaatacacattttaaaaaagtatcactacttagtgatacttttaacattagtaatgcatcacgtcggaacttacattgactatgatgttggtggctctaggaagtcttcagctccgttataatctgatcaggccaccatgtgcgctctctgctcaagatgtaagcattcttttgcagtgggtgactgtattttgtacacttactgtttatgacagagtaagtcctgtgcattggttctgtctcctctcttcttttgtttgtcctggagctaggaatggcctctaaacatttgcttggtgttctgggaaccttgcctggctttttctctagttgttcctgcagctctggcaaatgcctgttgatctgtcttgacggtgttagccaatgtcctcgcccggctgctctggactgtctggtacctgcgggcctgtgcaccgctgctgctagagacttgtttactactctactgaattcccactctctcagccccatcatgtcctccttggtttgcggtccagttttttgttggaatacatcctctggcacttctttcttttaaaaccaattttattattattgctttaatatttttattaagtttttgagacttccatccattgtattttgatcatattcattgcctcccatgggtctctagcacttcttagggcaatgcaaatgggagaacacttttgctgggaatttctgtgtatctgaaaaatgctttctatcttccgaataagcacaggctttctcttcattattattctttgagtgagagactatagcaattatttacacagcattctcatcgtatcacattaaaaataacttacaggggacctaagcctacaagaggatatctataggtcatacagagcctatgccattctgtataaggcaaatgcattaggaatctttaggaattttgtctttgaaaaggatcctggaaccaatccccagtgtatggggcagctttctgtcatggacacaagcaacttaggaggaggaaaggtttacgctagctaatgctttcagggttttttgtccacgaccatgctgccctaggcctgccatgcagcagcatatcatggaggggaacaggctggaggaccattcacgtccgtgtttcaaggttgtaaggattcaggcatcatgctgacctgcccctgtcacctggcagaatgcactcaggcagtaccctggtcagcccagggttccatgactgtgttgtttgaacacaggtgcaaaggacccctttaaggaagatccccgcccacttacactttcctctcttttccagttgtctttgcccgtttctctcttttcctctctctttcctgctgttcccctggggcagacaggacttttcctgtctccctcttctcttctgtcttctctctgtctctttacctcttcttttgctttccccctccctcccctttctaataaaactgctcactaaattctgtctgcctgtcatgtttgtctctccacctctgtcaccctcgcctgccatggaatctgccaaggtcccccattagctttatcatagcaacagctaccctcaagggcatagcccaaagacataacttccgcccagtaggcctcaccccttgaaggtttcatacccctctttcaatagctccatgaattggtgactgagccttcaacacatgggccctttgggggatcattccagaatcaaactacaacagctgcccggagaaagattgtgtgccgacttctgcacaaactctcttctcagtcagcttgacttaactttccctgctgcctgcccccgggtcctgggtgctgccggctttctgctcatgaggagccttctttccaaacacttcagcctgcgtctccatctgcttgctttctcccaggcttggttgaaagctgtctataattatttccttttatagtctcctagttgttgagtttatattgtaaaaaaaaaaaatgcatctgtgtaggggaagctgtagccacgccttcttaggggctggctacaggggtacctgagcaggcttgtgagggcgtggtcagagtgagtagggggactgctgggctgggtggaatctcatttgcccgccatgcaatgagatcctgaaggaccccagcctaagatgttttctttgcagatacgtgagaactgaatttatgaccttaacaggaaaggtccattagggttaaggaattccaccctgataaatggttcccagagatagagatgtaactgccctaaatgccccatgagcctggagattgtggtcggccacctgaaatgagccaatcagaaccattaccctcacttaccccaggacccacctgtttgcagtttttgcctttaagaagcccctagaccccagcttggggtccagctcctctgctcctatgtgagtaacaagttgggccccagctagccggttgctaagtaaaacctcttgctgtttgcatcaagtccttgtctctgcctggtgattggggtctctgcattcccaagtgttcaccccggggtcttaccccctggggggtctttcacaggtagtacaaataacttaagatgcagtgggctgactcggtaagtggtacccagtggacatgcttcttgccacaagtgcttcattgaggagcccaagaaggtctgagaggatcagggaattgtcccttgaggaagtgatgctgaagctgaaggagagctcaagggagacagagcgcttagtagagaaggtagggacaacggcagagaccctgtgactgcaatggtgacaggagcacaaggagacctgtcgtggccctgcacatctctgccccaagccatggtagccacgaggttcggcctgagtgggggagggtggacttggaaactcctagcaacccaacagctataaagaccaaacacaggcatcttgtcatctttagagagctctcagttccatgttgcaaaactggagtcttttctttattcagcatcttcctggctgttttctaactgttttccttggctgcttccaaggccacgaggccatttctgtctccttcagttgactcctccctgctagatcacccctaactctatctgtgtcctcacttgttacttacacaccttgccctcggcccaggtgcaggcctattcaaatgcttagtcctgtagagatgcaaactaggaggcatcctacactgaggctatactatgcaatagcagacctgctcgcatctgcaatacaattgtaggctggagctgagccgaggtttgtaccttgagatgatatttcctgcccccccccactgaagtaaggccagttgctgtctgatggacctctgagcacccccagcttagtctctgagcatgtgggcccacaccttatccctcccggtggcattcccagggtcactgtcaccctccatactccattcaggttactggggacagtgcctggccccaagattacattaattactccctttatcacataacctgccctgatgtcatacaagtcttggctacaagaccttgggacctaacccataactcagaaacctttcagcagagtaagtgtcccttaaaatctcagggtaaaggacagggagcctgaaactcatggtacagtcccctttagttatctttgcagtggggtagaattctggctttaccttccttgagccccagggtggtctctaaaacctggccctgacccagcccactcccatctaccctcacttgggctgactgtctgttcccactggaacacactggagggcactcggtgtgggaggaagctcaggggaagtccagaaagggatgctgtctcaggggatgctgtcactggggatgctctcactgggcttggctgtgggcttcagtacatcctgcctctctacaaccagacctgctctggtatctcctttgattaaggttctgttttccctcaacacaccggattcatcttcagttatttaattctaactataataagaaaaaaaaaaaaccaaagcaaaacaacaaaaccattgaactgcacaggaatgcaatatgagactgccaagcaaatgacaggcttgggagggatagagctgagagcgacccacagggctgtcatttcctggtgttcctgcacttgtatctgagctcgcctgactcaggctgagggctgggagatgcacttagcatatgccagggcatttgggtgacggggtggggtagggggacgacacttatgctggcctggatagcaggggtttgtctcctttagtcatagctactttacgtgtgtgtgtgtgtgtgtgtgtgtgtgtgtgtgtgtgtgtgtgtgtgtaggaaagatggcgctccagttctaggacaacccatactttggggtttttaagtacttttacagaagcctacaaagtcaacacaaacacactttacccttcatagtctgcccagggatagagcaagccctgacaaagcgacttgcagccagggcagcaagtatcctcagtccccagctgggctagttctgagcctgtcgttctagtggaggagctgctggcttctggtggaggtcccgagtcaccgggaggggcacatctgaacagtgtttcaacgcttcacctgtaagttccattgctctgtgcgacaggcagcagcagcctgcctgaacctgccaatcacgtattagatggaaaatcagatctagaggttggagaaatggcttgtgggtaagagcgtgtactgttcttacagaggacctaagttcagctcctagcaccatgtctggtggctcacagccatctgtaattccaactccagggcctgtgacgtcctctctggcctctgcctctgacctctgtgagcacgtgtactcacaggtaccttaccccaccctcacaaatttaaaaaataataaaaagaggaagaaaatcaggcctgaactctagagctgcctgacaacccctgcctcccgtcctgaaggccacttttagggcctggtctaggtgctgccctcaggctctagactctgtccttaggagtgatggatggggaggaagggagaattctgtgtcagtcgagaactcaagctctgggtgggagctattccgagtttgtcacctgactgtgtcactactttgggaatgttgcttaacctctctgaggcgggtttcctcgtctaaaatatggagttaattatgcctctctatctggaggtccctaagtgtaaaaagcttagtaaataagaagtgcttggttgatggcagctgataccactgccatgagattcactctggtgactcaaggttgtcctttcccctgtacagcccgactgtgtgtatattcagcatctgtgtgttcttgaatctgaccatagtttctccttggatcagacacatgccacgtactgctaactggggacatcagagggaaactcctgagcaacatagtatgcttaaaggaacatacattaagcagttaagagcacccgggctctatttccagcgtacacatggtagctcacaattgtctataactccagttccagggaatctgacaccttcacaccaatgcacacacaataaatttaaataaattatttttttaaagattttatttattcattatgtatacaacattctgcttccatgtatatctgcacaacagaagagggtaccagatctcataacggatggttgtgagccaccatgtggttgctgggaattgaactcaggacctctggaagagcagtcagtgctcttaacctctgagccatctctccagccctaaataaattattttttaaaaaggtacatgtgtagggtacttgattatccatacctcctgcttcccaaatactctcttcgtttgtctcacccagagcattcctagctataacagtccatttccctatatttccacagggaggtaggactggaccacaaggtggtttgtatctatgggaggtctagggcctgggatgaggttatagttctgtgtcctagcccttgcctagcacacctgaggctctgggttcaaatcccagagggatggggccacagggtccactgattcagggtcctgaagctccccatccacagacaggccttccaggaataggatggggcaggcaggttccagtgtggctagggaggatggatggcccctctaggggcctctagggacagttgtccatctgggacagttcacactgaacaggacttatttcaaagggcctgtggcagaggctgttttcagattctttcaacagcaggggctcttacagactgccagctagtccgtctttccattcgtatttgcatctcatgtgaattcacggatcacatctcagatcgcttctccattcaaaagctgccctgcctggaagaatgaagaatggagactattgttaatggcattgtttgctcttgggatctgccttgattagtgttctattgctgtgatgagacatcatatccaaggcaacttatgaaaaaaaggaatttaattgtaggcttgcttacagtttcagaaagttagtccattaggatcatggcaggcagcacggtgctggagcagtaactgagagcttacatctgatccacaatttgcatacagaaggactgagcctggtgtgggcttttgaaactcactctaacaaagccacacctcttccagaaaggccacggctcctaatccttcctaaacagttcaaacatctgagcctctgtgggccattcttgcttaaatcctcacagggatgcagagctgtgggcaagcatagcaggctcctcatacctctgcaatgacgatcatgatggttttctgaaactaagacttgcaaaattctcaggtatacattgtgaaggattgatgccgccagtgaacaccaggctaggccacatgctgcagctgcttcttccctgtgtcctgtgcctgttacctgctcacacacaatgtccttgctgtggcgcaccagctggaaggtgcaggagacggcacagtacgcaccaggccatctgtttctcacattagggatgcaaagaggtgaggctgcaaggcctccttgtcaaacacgaaagcttaattgggccagaaatactctccagttcctgcttctgcaagacagatctcagctgtcaccaagcatctgtggcatccggaagggacgagcagagttctgtgggctggaagcttggagaacagatgtctttcctctgtaccagttatgttcacagtgttgttttctttcgcctggacactgtgcgtgaccatcacttttcagggcttgcctcgcctgcctctgaaggcttctctgaacagcgcttcttctcctgctcagagtccttgttgggtttctctgctgtcatagtgaaaagcaacggtcagaacgagcaggaaggagagtggacagggggtgggaaggcagcatgtgcgtacatctccgtgtgcaataagtatttattgagcacttactgtatccagcggtgaaccatcagggcagagcttgcatttgttgctggagagagacatggcaatggtccaatttatgtaactgatgacatctgacagtgaaataggctttgaaaaaaactgaagcaaagttgagggagggtttgatttggatgggatagtgagttgagaagggaacaggaagaccagcagatgtgaagatccctttaggaccatcaaggctctgcaggaccagcattgggaaggggcagagaggtttgtggcactggggacacatgagaagtcgagatggaaatacacatagatggcacccacagttggagagtgcacagttgcccgtgtgagttttgcatcttgtgaagggatgcatttttcctttcaactcaaatttttcagccagcacagaggtccatacatgagacagcccatggcacagccactatttgacacagaaaggaatggagccaggagatgggatatgactcttccaaattcacttgcctggggaggagggaggaagcagggctctgacagagctacctgtggcagagccaagtggccgtaccacggagatgcctcctcccaggccctatctgttctctattggaagtcttcaattcttttcctctttctcttttctctacattcccttcctgcatttttctcctagcactcagggtgtgctgccgtgggactgcattgttccctaggcagccccatatggaaactgaagtcctggctctgtgattcccagggaacaggtgtgccagggcatggtgagatcagctgagtacgcagaggagctcagtacacggaggagcctgggtcccggcaggcaggactgtaggctctgtgcacagtagttcaggctgagtgcaaggggcctgcttgagtcaggggcatgcatctccttccaggtacctgacttgctttccttgtgtatcacatgctcttaggggcagtggggcaaaggggagttctgttgggagctggctatgcctccaagggtctatataactggtcacagaccacaggcaggccaactctggcagtccaactgctggctggagtgatcctcaattcaataaattctcccaaacctctccatacaaaggctttaaaaatagcccagtcacaggcaaccaggttcatcataggctcaggacagggtgagcaccaggcctgtaaatcgcccagtgattgacacttaggctactgtccttaattaaagaaaccaaaaggttagccttggacatgaaagggtgatgggggttcactgattttcctgtgtcactgaagatgtccttgatcccttgtcatctccctcttctccccatgcccaatctttgcactccagaagcccagaggaaggccagtgaaggtccttagaggttggaggcactaaggttttcctaagcctagtgtttttttctggtgcttctgaggtatggggtactgttatgttacctgtctgtcccctcaaagaggatgccattggccagtttagttatatggtgtatatgtatgagtatgggaatagaggctagatagagggaaccaaagagtaggttttcttcacccataggcagctgtcttagcacctggggatgaagtaatgacgagcccctgagcccagcctgtagactcgcctagcacagggaaggaagcaggtgctatgtgaagcctcaagtgagatccattggttgaggacagtgtgaaactggacagttcacacagctttcacttatctcagccctaggatgggctcatagtcacagggtatatgcgtgctgggaagtgagggctggagcctgaggaagccttccccatccttgtgggtggcacatagactgatattctgttctctgtgttcccctcaaaggccaggccaggaaggtcatttgggtgtggagagagtgcagagaagggcggagtgttctctgatgtagtttaaagggaaagatattgggagtagaaagagggaaattcagggaaaggaatgagcagggtgtgtgagaaatagacatccctctttttctgaaccccacccctatacacacacttacaagactgccagacacaggagggaatgagaactgagagatgagccatgagggggaaggccaaaaatagggtaaatactcgctttatgatcatgggtgtttgaacaacaaagcacactggagattatggttggcaagcatggtgagtccttgttctggtcagctttctgttgcagcaatggaataacatcagctaaatcaacttaacaagagaaatgcttgactttactcctgttttcagaggtttggagttcatggctgactggccctgctgctttcggcctatggcaaggcagtgcatcactgtacccaactcttggtgctgagctgctcacttcatggcctccagggagagagagagaaagaaagaaaaaagcaagcaagaaaagaaagaatgggagaggtccccaaacccttcaaggattcaccctcaaggacccgaagacctcccagtaggctccatctcttgaaggcaccaacatctttttaatatagcaccactctggagattagcctttaatattcatgtgttcaggagcattccagatccaaactgtagcagtcctctatgtgctggtgatttttctgagtgccagggaagggaaggtagccttgggcacctgcgaagtctcctgggagagagctgtgctcaagctgtctacagtgaatcagacatgtgacaagcatccaacttggaatataagttttgccttgagagactgtgggcctatttgtattttaatacttttgcattcttaaaaaaaaaaaaccatgggtctattttccaactgaaacctaaaggaaggttgaagtttggggtcctttggctgggagggattggattgtgccatctccttagcatgtggcctatgacctataggaacagggctaatcattctgtcattacctttaaagtgagtcattagtggcactgggtttgaatgaagaaagggaactgtcttatttagaactactgggactgacatcttgtagcaaattttccgaattataatattgtcagtacatgaaacaggtctaaactattcttgtcaggtgaggggcattgagccatcttcctctctgtagctgtcttaaaaaaaagtgagatagaatgtgtgctatgtgtgtccaaagctttggcaacagattgtaagggaacacagactgcgaacccaacaaaaacatacaagttgctccgatgcatatttaatgattcagacaatttgaaaaactgttgtgactaattttctatattttagtcctccctctgggtgtttcttaggcccgctgtgagatttgagattggctgaccctgtctcagcttgggagatgtccagagcatagcttagcccttgtaacccgagaccctcttcaattcagaaacagaaggctgaccctattctgtgattgctttctcagcgcctggtgccctgatttaggaatggagtctttgttgtgactgatggagtgtgagtcctgcttgaaagattgctcccattatgtccctaaccatccctccctacttaagactgtgtctttttctggtagaactcaggattccctttccaaagatgactaaatgttgcttgctattggggggttctgcctctttccagaagccccccgtacctcctgatgctagccccatacctggatcacctatttgtgagcagtggtaccactttcagcctctgggctccagctgtttagctgggatttcacccgagcacagcaatgtggctgttcttccgcccgtgttgtggcgctgaggctggagctggcccttttgactggcacctgacctcacctctactgaccccttcttcttggagcattgagtggcacctacctcactctgagtctaacgcatggtctcttggtaatggcaatggtggtgatgatggggatgatggggttagtagtgatggggaatggcaaggatggtggggaggtgacagttatctctgtaccagtactgccgctcctttcctttatttttttaaataaacactttcagacattaagagaaaacaatagtagggaacccatatgtcagccaacttatatgttttccagctcctgtgactctcttgttctctcttctttgtcctgtggccgctcacactcttgtctgttggagcatttcaaagcaaatctcagatgctatttcagtcaggatacaaggcctgaagtatttattttgttttttggtttttcatgacagggttcttctgtgtgtagatctggctgtcctggcacttgcactgtagaccaggctggcctcaaactcacagagatccacctacctctgccgccagagtgctggaattaaaggcgtgcaccaccaccactcagcaaatttatttattttattttatttatttttttaaaagattttatttattttttatgtatacaatattctgcttccatgtatatctgcacaccagaagagggcaccagatctcataaaggatggttgtgagccaccatgtggttgctgggaattgaactcaggacctctggaagaacagtcggtgctcttaacctctgagccatccctccagcccctatttattttattttttaaaaaatatttgtttgttttaaattttgtgtacatggatgtcttttctggacatgtgtctgtgtactgcttgagtgcctggtgcccatcaggtcagagtaagtgccaggtctcctggaactggaattgtacatggttatgagcagataatatatatatatatatatatatatatatatatatatatatatatatatatccctaagccattatcacacttaacataaatttacttaattgtctccacataattatcttttaccagttggtttttctaaattaggagccaaagtttgcacattcatttgttggggcttctcgcctccttctttactctgtaactgcccctcccctctgttctgtgatttgtgagggcgcctgagtggtttgttgaagacacccaacattctggactgggaagcattagtctcctttcatgttaactatttgctatgagctctcatttaggcctaggggtttaagtaaacttggggtgggggtagtatatgggttgtgctccccgctcctggaaggaaagaatggtttggtgcatgcagacagaatttcagccattctgtcgctggttcagccttttctacagagcactctgagtttggatctatcccaggcaggaatatttatttcagagcacttgctcttccaatggcctccctgctggaggcacagactgtctgactcactctcttcttctatcaagtgggctcagggaggtcttggtagcccagatctgtcacatgacttttcaatcacacccttcttgtggcttattgtctggttatcttctgtagagatgcatctcccctccttttctttactttcagaggaattggacttaactgagcaggcttgaatagtggccctgagagttctgcttttagcacaacttgggcacattgaattctttttgtgtttgattgtgcagggttgcaactctcctattttttaaaggcgagagaaagaaaaaaaacccaagtttctatcttgaatccaaatttaaggtcacagggtttctacttcacttggttgggtttgtactgtttccttttcctttgctgaaatgcttgtctttaatgtttttgacatattacttggccatcccaccatgtaactgtaagtgtgacccctaaggatgtggtttttgaatgcagtgccagacctccacttctcagagattccccccaggactgtattgtcacagttctccatgtgagaggcgtctggagcaattatcttctccatattgttataccctgttagacacgtttctttttgcttattctcagtgtctcagatttgcatattgctttgtgaatattttttaaaaatctagattcaaaataaaaaaaaatgataaaccaagaggcaattagagttgtctagttctttgtttttaatgtatatgagggtttgtctgcatgtatggaggccaacagaggccagcaaatcccctggaactggagttatagacaattgtcagctgccatgtgcatgctgggaaatggacctccgtcctctacaagagctgcaagtgctcttaaccaccgagccagctctacaactaagaagttgccgagttcttatctctacctccttcatctattccttctccctctctaggaggcttttattagtacttgattcccattcattaatcaatctttagaaccacaacaaatgtatatatattcatcatgtccctccctgcactgtaattaatgatggcactctttgttggtgttgttgctcttcccagtgagacgtgaagcccttttctcctgtctcagaactgcgttggttctgtgattgttttcatggtaatagtgtaggacaagtgacagcgaatcctcgaatcttgtttccaggcccatggcctcctcgttggttcctctgtctcctttgggattcagatttcagctgccaaatgacaaacctcaagctagccagtggaggtagaaggtctggtccttacaaggctaccaaggccccaacacccgagtgactcatggcagacattccagcctgtcacctgatcacaggggtatgagggatccaggtgggaatcagaactgcacagtcaacccacacaatcaccagggacaatgaatgcttgttgctcttttaaaccactgacttttgggatggtttgttctgtagtcctatagaatggaaccattaaccagatgcagacgttctgttaacatctctgcatcttgctcagtcaatgcatcttgagttgcatcaattctgaagtttgtgatgacccaggttataatggagacctgagggataaaaactgaagcagcttgcccagggtgcacagctggggcatatgcttactagggctgcataatggagtacctcacaccttggctggaatgatgggatttcatttccttgaagtgctggaagctagaagcccaaggtcaggatacagcagtgttgagttctttgaggcctcttctttgcttgctcatggctatcttcttgaatgaccacccccttgtgcacatatacccacggagtccctttgtggggcccagtctccttataagaatgccagtaattggattagggccctccccacaagccgtattttaacttaatcatcttgctaaaatatctgtttctgaggctggagagatagcttagtggttaaaagcactggctgctcttccagaagaccgggttacatttcctagcacccacatggcagctcacaattgtctgtaactccagtgccagggaatctgacaacttcataccaatgcacataaaatagagttaaataaataattttttttaaaaaaatgggtcttcccttaaaaaaaaatctgtgtctccaaattcagccatatcctaaagtactggcaattgtagattttacatatgaattttgggtctcatgtacatttgtgattacctccagtttgcatgactgtgtaggatgtgtgcccacacataagatctgttggtgatgctggagcatacgtttttaatcttataaaatgggctccaaagtaataagaatgagatggatcagaattcaaatagtaaaactcgatttagaaagcttaagaagagtgagcaaggtggggccagagagatgggtggctcctcaggtcaatgtcttgcctccaagcctgacaacttgagttgatccctgtagcccacaaggtggaaagagagaacaaattcctgtaatttcttctctgatctccccccagaccaaaaaaaaaaaattaaatgagtagagcatggtggtgttcacctttaatccctgcacccaggaggcagaggcaggtgggatctctgtgagtacaaggccagcctggtctacaaagtgaattccaggacaaccagggctattacacagagaaccacccccaaaagaaaaagaaagagagaaagagaataacccctccctctactatatcaagagaatgattttagagagcatctcactcactcactcactcactcactcactcactcactcactcactcactcactcactcacctctagattgggatggctattttgctcagtaggctctatctgtatcttattaaaatgggtaaggttactaggtcatggtgttggtcaaactattagcattggttgggtctacaacaagctatgagtaatttgtttcttctaaaacttcagtacttgttttgctttcactttctgagcatttatttctttcataaagagggggcaagccacacagactatttaaggctaccctgggtcccccttctctccccaacattttggacccgatgaagtctggttaaggaggtcaacacttgctcctgggcagggaatagcctcataggagatgaataaattgaaggtgagggttgttggtgagatgggcatccagacaggaagtcaagtccatggcagaacttccatcaaaggaactagtccagctatcagcctgagacagaatatagccacagacaagtgcacaagacgccctgcttttcggtgtcatagagcagtccctggccagcagagggagagttccactttactaccaatggtactgccttcaacccatcgtagtcagcttgtatcccacccttggagatgcctggagttctcatatgcctcacctagtgaatccatggaagatagatgggtgaacagagagatgtgtattatacaggaaaaagcccatgtggctatggaaactgagaaattccatgatgtatagctggtaagctggagactcagaagagtctgtgccaaggccaagatcaaaggcaaaagacatcacaacttgaagacagagtgagttctctcttacccagcctttgcatcccacctgtaactgcaatggataggcccagtctatttgacacacccaagataatgttcagccacatatttgggcgtctgttttagttagggtttctattgctgtgaagagacaccacatcatggcaactcttacaagggaaaacatttcactggggctggctcacagtttcagacatagagtccataattggcatgtcaagaagcaaggcagaatgcaggcaaacatggttctacatcttgatcagcaggcaacaggaagtgaactgtcacacagggtgtggcttgagcatagatgagacctcaaagcccgcctccacagtgacacacttcctccaacaaggccacacctcccaatagtgctactccctgtgggccaagccttcaaacatgagtctatgggggccattccattcaaaccaccacaacatcccatggttcaccctagtcgacacataaaattaccatcacagtggggataagaagagccaggagaagaaaatccctactagctttttctcctaatatagtaactaactatattatctcatgaacatcagctcagctctcagaaattccttgggtccagtagacagccaccatattttttcaaaggggagactggcttggctttgacagtagaaagagcctcgctagttagctgctcagggggaagcagggagtcctagctggtgattatgcagcctgcttggctcaagccccagaagccagaagatgaaaggaaggaggccagcagtgctgtgctggggggggggttgtgggcacaggtgcctcctggctattgaatgccatagctgggcactgctctcaggactcttggagccagcactcagaatagcgctgagggaggctgaaagggatactgatggcagcaaagccattctaggtggggaatctgttcataagacactcctcggacaatggcaatagtgcctgtttttgactgacactgtgttgcagccaaaggctctcatactgggtcacccacctagaagcaaatctaaatttatttttgtgtgtggggtgtcatgagtctttctttattgtgttagtcatttcccatggtgtatctgagttttatttatgtctcttcccccctcccccacacacatacatgtatacatatgtgctggccttgtacttactgtgtagctgaggagaaccttgaactttacaaactatttgttttttatgtgtatgtgtgtatacctgagtatttgtgtgtgtacagtgtgtgcagaagcctgtggaggtcagaagatggtgtctgatcccctggaactggagttacaggtggttgtgagccactgtgtggatggcgagtcccttgcaagagcggcaagtactcttactactgtgctatttctccagccccaatcttgaacttttactcctcttatctctgcctcccctgtgctgggattacaggtcggtgccaccacatctagtttatgaggtgctaacaatagagccctacaagaacagtatgctaggcaaccattctaccacctaagccacgtccccagcccccaaagttctaccagaatggttatgatcacgcctttaccaagaggcctgcaactaacgacacctttggtataagctgattttaaaaagaccaatttttattgtgtgtgtgtgtgtgtgttttacctgcatgtgcactgtgtgcaccgtttgtgtgcagtgtccttagaggccagaagagggcaccagaacttctggtactggagagacagaccattgtgagctgccaggtgggggctgggaacccaagcagggtcttgggaagagcagccattgctcttaatcacttgtaaacttttcttctaagatattcagaatcacacatgctgtgtgcagacatttcttgagtttcttgtggaaaaaaaagagagggagagagagaaaaaggaggctatgacctctcctaggtatggtggaagagaaggtttattgtagatttgagggagggcccagaaaggggcagagacgtctgggagagtccagagtggacatgatcagcagactgagctgggccatgtgaccagatgacaaagatgagagccaggagatcaagaagccgaagggcaaaagggtaaaaaggaccaaataaccaaaacggttagacaatgtagggatgaacagttgggggcaggggagcctaacacccgggctggagagtccagggtagagggtggggtatgccagccgggaggacccttaacaggcagggactgaggggcgctgggagaccctggcttaccaggtctgctttgatatgttaataatggcacctcagccatttgcccctgcttagaaccctaggttgtgaagggctggcaggggtgtgcatgtgtgtgcagaaaattttaaggaattacagcaaataaaacaggtatgggaaaattagaactggctgaacttacccagctactcaaaaaaaaaaaaattatcatctaccctctcagaacataatgtcaacttacatggagaggttatgaaaattattaatttttaaatacttaagaaaaaggcagccctcaggaggtatcatcgattgcttattaaatgtgagcctccagggatttctgtgcaaaacaagatatttgagttgcattatagcatcttccttcctcaaaactgatataaaaatagggactttttgagaaaggaaaagtgtaagtcttttcacttacagatacagatgcaaaaacattaaagcatcagcaaataaaataccaaaatgattctaaaacaatttcatacatttaaattagatttatcttgggtattttggaaagtctaatactagaaaattgcaaatgcactcacgttattaggagtctaaaacagaaaaaccgtgtcattatctcaatagatataatggatcactgatggtttgaataaagttacactaatataatttttaacattgggcacaaagacaatttcctcgacaataaaaaccaaccaaccaaaacaaacagaaacaattccccaactaacaggatagtcccccacatatagatagcacctgtgtctaggcaaatagtggccagctcatctaagattggcctaaagtgaccataggctttcatgatcatttgcagacagactgtaagggctgtggactttgtaacagtaaggataggggtaccaatccttacataaggataggatataaggataggaagtagcaccttagaacttggttctcaaccacaattctagtttgacctcttgtcttactgtttcattgctgtgaagagacaaccatgaccaagtcaactcttataaaagaaaacattaactggggcctggcttgcagtttcagagcattagtcctttgtcatcgtgaggggaacatggcagcacccaggcagaagtagatgaaagctagatcctggcctgcaggcgggtggtggtggtggggctctcacaaggacttttgaaaccttaaaacctacccccagtgacacacttcctctaacaaggccacacctcctaatccttttattccttctcaagcagttcaccaactggagatttagcatgcaaatatatgagcctatgggagtcattcttgttcagattaccacacttccctgacaaaaaaataggctttgagaggttgatcaaggcattcaagagcacagagcagacagagttagggttggggctcagccccactagtgccttcctaattgagccctgctggaaaaaaagccacagttctaaaaatcggcctgcagaactactgcaggggtcacttggcttggtcctctgagccctcttcacagataaacctatgccactgtcatcaaaccctttacctcaccagcactcatatcaagccacgtgacagcctgggcttgaacagtagctattcctcatgctgggatgttccaacactcagtgggtcctgaaatcacagttactgaactctgcacactgtgtgttttttccctatacagacctatgaagaagtttaatgtataaattagccacggtaaagtgttaacaattaataataaactaaaacacctatggtaatatattataataaaagattgtaatttgggaaacacaagtactgtgataccatgacacccaggtaactgagtgactgtgggtaggtaacatatacagcttggatacactggacaaagggatagtttgtgtcttggatgacactgtaagacccccggaagctcaggcctccaggatctcagcctaggacctcggtcaccccaatcaccaggcggagtcgaaagcttgatgcaacagcacgaggctttattatagttgtttaacgagctaactccatgttagcttgggccttctatccatccaccatggcggatggccaggaaagacagctgaagcgtctgtatagagatctttatagggcagcgtaaggggagtgtctaggggtcacacaggctcaggattggtgtgcctccaggcttggagggtttgccctgtgttgattggtcagctggttgttatggcccataggccctcccagggtggttgctatgctctgtgcgtcattgctgtgcacttgtccgtaaagcacacccagagccgtaaagcatagcaccaccagctaacttctgattggttccttgtcacgaggcaggcatctgacctcctagtgactaagacaaggtcagactagcacgtgtccggctgttatggctgccgatatggggagctggtcccttcaacacaaagtaggatgggacaaggtctcatatgctactcaggatagtgtacaatataaaatttatgaattgtttatttctggcctttttcacttaatattttcagacaggcgtagccactggggactgaaaccaaggcaggggaagccaatgtcagggttccactgtcatgatttatgtgtgcatttttcccgacttgtcggtgttctggagtcccggtctctctttatctctggtgcctggccaagcacctggtattttctactattcaacattgtcgttgagttattaatatcaggtcagagtggatcaataggatatgtggccaaccagaggtgaatggcagctcagagagatgcgttgggtgagcctgtggccctccagcacagccctcaggccccacctgctgctcctccgcagcttcaatagagtccagcagccactgtctgcatttcaaaacccattctggtggatgaaaggcaaaatctgaggtcatttggtcctttacagtaaagtttccatggtgaccgtgccaaggcctgggtgaggcagcctgactctcagggccaggtccaatgtgacccacacaccacacacgagacaccttctctatgttccctcccatcatcggagcccagggctgcactccctccccaccccagggccttgcatcatgcttttctgtagaggggagaggctgggcaaaggacaggggagtcccagtgttgcaggcctgtcccatcacactgagatgcccacccacttttgaagtcccttgagctctagggcagctgttcccgcctgtctcttctgagagaagtctctgagagttcagctgagatagttttggatgtttcttccctgccagccctgtgagacagagctcagctttgtaacccagagcaggcttttctcagtcactgtcctcacctgaactggggctcacccagcatgaggaagttgttccaaacaggtgtttgtttgtatccccacttcacatctcccccaggtaacccttccctatgactcgtccctcccaggccttctctgtcccctcattttctccccaggccttcctcagctctcttacctgtacccacccagcttctggtggtcgagcctagactatactgctctcttggctccagtatctttggaatgtctcctgggaatctcttccctttctcttgggccttcggatgctgtcaaaggctatccttgaatgaaggcccagccaggacaaaaaggcagttcgtggctcaggctggtacatggcatgctgtccattatggagcaggttgtctgatggccactgagcccctcatcagttttgctgtggaggacctcccaccacacctggcctttcccaagatttcctgtcatgctagctgttaactccagagacaatcccaggatgggtaggctgggagcctcacatacaagaggactgtaaagataatgaggtcaattctgtcacagccaccaatagattcaggactaacagattgagcccacactcagcaggcggaaatgtgtggtgttctctgtatgggaggtttgaacttaaaggaagtcttcaggttatcctcctccctcatgtaggtttgcaaggcaactaggaggctgcccctgggagactattttagctggaggacagtggagaggtaaggggtcctgaggccctctggtccacagaccttcatctgctggctcttgctctaggtggcctatgacaaatactatctctttcacaggttgtccaggtgactgaggaagtgtctagaataaagcctatctgagaaccagcgggttaagtttattctccaggagacaagcataaagggatgagatagctagggatactttcagtagtttctaaggctttggaaatctacagcccaagtagacaccctgcaggacaagggaagtggccatctcgaaccttcacagcctggcattcctcctgtggacagctgtcattctcagggttcacagctgcctttccctctttatattattacagataagaagaagagacaccaggaacttacatcacttggccactgtcgtacagccattaactggtggggctgggatttagacagatgtggcctgactctgggatcgatgcctttaagtgctgcagggtttcaccccccacaggttgaacattcctattccaaatgcgagaattttgcggatttgagtgtttttttttttattattttttgtggatttgtttgtttcttttttttttttttgattttgggataataatgagatagcttggaacccaaatatgaccatgaaagccatacctgtctcatgtacaccacacacacacacacacacacacacacacacacacacacacacacacacacacctgttttgacaggctcatcactttcagtcaaacacatgtcagggtcagattctcctttctctacttcctcctgttttcttcggtttgttcccctccggggtatccggggcctcagattcaactttacttccctggaagatctttcaggttttcagcagccagccctaactttttctcttttcttcctgtgccttccccactctccagccgcagtgtgtaagctacttccctgaactctgagaaaatgcctaggtggctttctggagcattctggcctgctctcccaccccaaatcactgggtgttattctgcttgtgttttgtagcagaatgttttatcaggaggacttgatcctaggaccctcctgctgtaaccatgctcagagtgagggcacacccccaccccccagagcatcagcaccatgctcagagtgagggcacacccccaccccccagagcaacatcggacagctctgcttttctctccacacactcagaacaggccaaagtcttctagggtttgctgtttgttttcactcctgaccaaagcgatttctttctgtttttgtggcctgcttaacttttctcttttatgtgctagttgtcaaaacaatgaattagtttgttagcatcctcagtagatcccagtgagctgcttttagtcatcacagactcctgaatttaacacatttgacctgtttccatcttttgctatccccactaagctcacattgttacacctctagctagtgggggtgggagggtcattgtcacagctccatatttctttggatcttcctgacccttatcacctcttgttgcctcctcggaggctgcttgcttctcagggtcatctcttctcccaagctgggtgggagagggtctagcagaggtactgaagaattgtcccctgcagcgtctctggcagggaggagtgggaagacgggagagacatctcttccatgtgtctggcttattctgtgagtgtgaactcagttcctttggattgagctgtgctggaccgtatccatctaggatggagttggaggagtctccccccaaaagaaagccagggctgaggaaagcagggtggcggttgggggctcatgcttcctggtgattctgggaagaactactagaactctgcaggggctgtgattgcaggaggcccctcatgggcagttgtggacttggcttcttaagggggcattcctgttccaggcttagctgggcagaaataaggctacccacagactatgaatcctgggcaaaaggcacctcagggattgccccttgagggaagccagaagaaaagctcccacagctctgcttctctctggctcaacctttacccagacagggtagactgggcttgttggcacccatagcttctaggtggtttccagggctccatctacttagtatgtacccaggtgactgctgccaggtaacaaaatagagagcaatggctctatggcaaatatcagaagtggagcatcctcctactggtgccaaaggcaaagctgacccttctaccttatttctgagtcaatagggaaacatctgctttcaaagactgcctctttccaggcatggtgtaaatttcatcactcgggaagttgaggcaggaggattgtgaattcaagatcagcttgggctgttacatagcaagactctgtctcaagaaataaaatgaaatatgaataaatcccctcactccttggaaaagatcctttttatttgttttaaagacaacctcttgagggtgcagaggatttgcgattgcaaagggagctgaactaaataatggataagcttcctttcaactctaagtctattttaggtctccctggcaggccaagaatatttatctcacagatagcaaattcacatgttagaccacttgccagggcctgaacataggattttactcttccaggtgagaaatatctcagaggggaggatttagggttttagtaatagcttccttgggttgggagccagctctgagctcttattgattgacagctacattaaggtgagagcatgggacttcctgtcttgccaaaaagcaattaggaaggcttctttggccttgaacagggatgtccaaacatgccacaaactggcaggccctaccaagtccctcaaggggtcatcactagttaggaggcagaagtagccctaacctccatccctccctgagggatctagtccaacagagttccactcgggttcttgagataacatgagttttgatgacacagctttggtgtgtactattgttttgaggctgactgtcaatgagttagagattctaccctgaaaaatactgccagtcttcatgcctactgctgtatgtgaggacacaggggttagagacacagctccatacacctttggtgtttgggggaggccgctgaggtaagcagaggcagggaggatgggtcctgagttagttcagcacaggccccagtctgcactttggcttggtatagtcttggggagtgtggtgtctcctgcccagggtgccactggtctacctgaggtagtgagagaagctggggcatggctggggtagagctcggtgtgtgtgaggccctgtgtttcatccagataaaggtgttgaaaggcctgcagaccgatactaggatggctcttccttgggaatccaagtgaagatgagtgacgtcctacagatctgactggaggatctgtagtctcgtgccagcagccggcccctgtctatatgagcagactggtctgtctgctccagagccccgttgatccttgggtgcttcacagtgagattcaggaagaactctgtctggtctcaggttcaggcaagtggttgcctagggcagcacatccagccctttccacctggcaatgaaacagaggggtagtggtcagggctgatgccagtccatgggagtggcacctctcagcaagaaaccacaagtaaaggtagacttgtcttctgtaccctaccacatgccaggatgttccatatcagttctcctttttaaaaaagatttatttattatatatacagtgttctctttgcacgtatgtctgcaagccagaagagtgctgctcttccagaggtcctgagttcaattcccagaaaccacatggtgactcacaaccatctataatgagatgtggtgccctcttttggcgtgcaggcagaacactgtatacataataaacaaataaatcttgaaaactcaggacctctggacgagcagccagtgctcttaactgctgacccatctctccagccccacatatcagctctaattgccatccatttagccactggaaatgacacagattgtcctacggctggctttgtaggtctggagcctgaacttggtgtctggggctctcttaggtttttacttgatcccttttggtatttcctgggtcgccactaagggttagtagctactgcattccttttttggaagaggctgcttccaagcttcctccagctggaactgagctcatatctgagcagctggaccaccaggattcttgcttttgctgctttgactggaggctaaacccactggagtaactggagtaagaattgaatcacatcaaggggccagcgtgttagtaccattgggggtctaatcctgaagaagtgactgtggtggagaaagacagccatgactagttagtcaaataaatggggtatttgggtgttagagaggccactcttaaccactctctttagaacatctgttttgtcccataggaccatctcttgtattgtcttaggatggtccattgactggcctgacaaatcacctgcacttgtatgatggtgttttgcagatgtctggcactaagggaattgccctgtctcctctgtagagggttagtaatgatgattacagtagtaggcctgccagctgagctgcctaggggccagcatggtgcttagctgtgatgaagtcctccagtgtgctttagggggcaggtactgctattgcctattttggaaatatagaaaccaattctctgagagtctaagcttgggtcctaagattataaagttgatgagtggcagaggtgggttttcttccctggactgtcagacaccaagcctgtgtgatgacacacataagctcattcatcctgccatcagcggtaggtctcatgtgccctgtacgtgtccaagacatagccgtggttgggactaaccatggctgggattgctgaggctgtgccaagtttcctaagggtcctggggacagggcagagagatctgtctctggacattctggctccctttgttgcatagcagcacccctcccccacctcgcctagcctcagaggtactgacatacgtgccgggtggttaagaaagaaacaaatcaacctacgccaggaactagatgctgagagggaccagtctgtggtgcctgccagaataacagagcttcatgtccccatgtgtcatcacaggaagcaggggaccacgcaaccagtgccaaagcatctggggccagtgtgctgcctcgtgaggcaggagagctgggcagctcaagctgccagtcagggatgctggttaggggctgaaaggccacacctcccagagggctgcagggacagacttaaagggagctcactaagagaacactagttctgctggcccatccttggtgacttgtagatgacgaagagtacagtccttgttgtctcaattggctttgttgttgttttcttttcttaattttcttgttttcaaacagaatctcgggtatcccaggcaagcctcgaactctctgctttggagaagatgatcctgaactccaaatcctccttcctcaacctcccaagtgctgggattatgggtatatgctaccatgctgggtttatgtggtactagggtcaactcctcggctttatgcatgccaggtaaggctctgccagctgagctatccctggctcttccttgctttgttttgtaggatgttgcttgcttagttaaatgccacggtggtgagtatgattgcacacaactcactgtctattggatttagagtcttccctaaatgcccatgtgccaaaggcttggtctctagcttggcactggggaggtggtggacttttaggaggaaggactctggtggagctgttaggttactgggactatgttctcaaagaggacagtgagactccatccttggttctctttagcccgactgccacaccacatgctcccaccacaaggtggaatgctagggcagagtgatcatggactgggctaaaagaaacctgtttgaaaatttattatctcaggtgttttgttacagtgatagaaactgattaacacaccacccttggggcgtggagatgaccttcaaggtcaaaggcgagcaccctctatcttcatgaactttcttcctgccccccacccctctcccttttgatttccatcttttttccagctttgagaacgtcttcagtcctgggattcctaccacttctgagaagatgtcagtgaattgtggggcgtcagcgcgttgtgttggttggcacctggatgagtgagaaaatccagttcacactgatgattgtctgggatgggccaggacttgccagccatgggttggggatttggggctccagatggtataactgtaaaagccaggtttgatcttaagaatgctgagaggagagagagatggacagttggtgtctctgtctccaaaaagtgtccttgttccctctccacttggtgctctgttgggcgggaggagaatgagcctgatttccagtttctggggtaagctctcatctgtgcttcctagcaacccctctccacgcgtgccccctcggtcaggtcactggagcctacagtccccttctgctactgccaggaatagccccgcatcacagggaatttccagaccagttcagagactgacatctcccagatagcactgccctagtgtgtacatgtggtagggaagagagctagggaatggagagagagaaactgacaatgcaaggtctggaagaaggatgctcaccagtgaggaggttagaattctgcaggctttttgcccacctcaaagactgcttcctctgaggctactgggatcttgaccctcagtctttggggtggcagagatggatggcaggcagttgcatggtcaggacctggctagatgaactgttttgttttttcccttcctcctgtcaatcaaattgacatattgctcaggtttttagggtaattacagataccctcgggtttttttttttatttcctactgtcaatcaaattgacttattgttcgggttttcagcggtgattacagagaccctcagtcttaatcaccagcagctttaatcaagagagttgatcttcaggatgcacagagggttgattacagcttaatggatttattaggagctaagtgggccaacaagtaattggctaagtaaggctgactgcttatagaaaaggagcaaaagctaaatgctagggagaaaatggtcagggggtgctggggagagactccaaggagagtggggaagaggttgggatgtgcagagtgaaatgagcaaagtggaactctgtggtcccaaggaaaaagctttggggggggggtcatttaccagcaagcgctaggagctaaacaaggcattgagctgcttcgtggtcctcccgccatgctttccctttgacacgatggattgtaggctgtgtcttctcaaactgtaagtcagagcatgacctttctcttcaggtatttgatcatggcagtgagaaaagtgagcagcgtgcccctcgaacgcagcagcccctttctgttggcgaatcctgtctggtcatcatttgggaactgtctctcccattctccgtctttataggtcaggaagagtccttctcctctaccctcagtccttgtgggcctgtggctcagcctcatcctctcgagccatctcctcactgctggcagaatgcacttcccagctgacacagtcataacgtcagtcttaaagcccgggcccccattcttcttccgttaagaggtgggctgccctgtatttaagtctaggtgggtggctgagtccctaacagtgtgctgctgaggacggatgtgacttctggaggagaagatgcttcttttggttctgcagtcaccattctcaggaggattccctcacaagttccgttttagaaactggctaccatattttattgtaaaaagtcatggaggtgaccggaaggaccaccccggaggatccagctttcaagctctctcactgaagtcactgacctgagaatatgttgtggtcccagcaggtacagccattagccatttgagtttcccagccacagacctggacacagtgtgtggtgtgtgtgtgtgtgtgggggataagaggggtggggagctgcctctactgtgatctcactgtagagtagaatcacttaaaaaataaccatgtcaatttgagggtcacctgttgcataatagcaataaatcagactcgaatgatgtgctatgcctacttaaaatgtcagcaatgcccagacaacagaacagagtccggattcctctggccttcagcaatagccagcttcttgtcctccttagcagccccaggcccccagcttaactgcatgtctggatgttctctgctttcctaggctcccatgtgttggcacccacaaggtctctgcctgggtgtgaggaagacagccagaggaaactggggaaatggaaatctctttccctctctggcttccttttcctaggactaataatgacagagggacctagaaacgggtgcagggatctgtgaaggagtgttcatagggtggaggttagtctccagacctttagatgaaatgacacttatacccattggttttggatggagaccacctgctttcatatcgttacggacttatgtaacctcttgatgcttcacctataaaactgggtatcttacagggaatgtgtaataccaattataaaacagggtaatgtgtaataatactttgtagcaagcattaaatgtggctaagagtttaggatggtgcccagcagatgatgttgtaataaatgtttaaaataaaacacgcctgcaagaagtttcctttagtcattaaatcttgacccgtgtcactttctgggagaggccttagtaattgatagctcccctgcagctggctacgcagaaggtctcagtcacagcaccttcagcacatcccacctcatatttgtccctggttctatggttcactgcagtcctgcagcttacctagtacactttcaaattattcttctgtttaaaagtgtggtcttgctctgcctggtttgaacttgataggaagagcgcctcctgcctccacctctcagggactggattgcaagcgtgaaacaccatgcccggttagaggaggttactttcatccattcacttattcaagggtagatgaagacagtcttattgagaagccggaattctactcctggtggtcggcttggactctgccaaaccttttgtctattcccactggtgcattgtcaacagcaggaggcgctgtggtggcattggtttttaaccaccaagttgtcagtcgtaagtggcccaggtggcccgcaacactggttagggcatggttcccattacctgctccctcttgagggagcattcctttccatttttcgcatctctgtgagtgaatctgtacgtgagacagcgtgtgtgtgtgtgtgtgtgtgtgtgtgtgtgtgtgtgtgtgtgtgtgtgggcgtgtgaagggaacatcttttgcagacatgcacgggcttataaagctgcaagcgacatttctcgcttccagtcctaacatcatctgtgacttgaaacccgttgctttttctccgtgactcggcagagtgagcagaagacttcctagatttcaggctccccgtgtccctagcccccatctccccagcattaaatgcacactcagaacagagactcaaccttgaggctttcccaactggattagtctagtgctcgcccagctcttggggaccttgagtgaggttctcagttcaccagcggtgggagtgtccaggtacctggaccacaagcatccttgcgctctccgcgcactttcttccttcgcccgggtctccattgctggtgaatgatgggcttagcgagaggtgtggagggggcggggaaggggcccgcaggggaggggcgagggagcgcagtcaccgagtgtcacgctgcccctcccgccctccgcccggggtgggggcgtggagcgcgggagggcggtcttcattgccagcctcgcagcacccggagcgtgctggcctcctgagcagggcgccgagcgcgcagcccagagccggcagccggcagtcgcctgccctcgtgtcgcctgccctgggcggctgtcgggttcctggagagcgtgtccagccatggagcctttgcacaaagacgccgagacggcggcggcggcggccgcagtggcagcggcagatccccggggggcgtcgtcgtccagcggggtggtcgtgcaggttcgcgagaagaagggccccctgcgcgccgccatcccctacatgcccttcccggtggctgtcatctgtctcttcctcaacactttcgtgccgggattgggtaagaagtgggagggccggacccttgtgaccccttgaagccctgctgtccctgtgacctgggttgcctgctggggagtgggtagggcggggactgggcactggctgagacccatgggtgtgcccaccggcctcagactgtgctcccacgattggtcttctggcaggtggctgaaacccgcggagtgggcaggtgagggacaggtgccacgaggggggtctctgaccgcaagcgaggtggccaggtagagaagagctataaacctggcggagaatcttggagccccaggcagggaccccagggctccctggctccaggctaggctacggtccaagcgagtggaatcttgacacttcttccccaccgagcgcatctttctgtgatcccactacttcgggaagggaggaggcagaaccggaggaactcatggctgaagtggttggtggtggtgggagggtgaccaagctccagggagtcttagaagttgattgagctgggggaagccgggaaacacagatttaggagacgcactgtgtcaggtcatactttcacatggagcgtgtgtgtgtgtgtgtgtgtgtgtgtgtgtgtgtgtgtgtgtgtgtgtgtgtgtgtgtgtgtgtgtttgggtcacagctcttgagccagagtctcttttcctggtgcctgcattttttttccagaacccccactgtacaccgagggaagggaagggtgtttttattatatagtttacacgcaggtggatttgggctgcatgtggtcagaagtgagccgggtagaaaacagagaacgctccccaataagtctgtgtggggctctggctgtttggacacaccttagtgaaatcactgtcccaaaaatagtgactaagggtgagtagaggtagacaatgagagcttttcggatctcctctctccagccccaaatctccaactgcattctcctcccccaccccaacttgattgcttgccaccagtggacccttctcagcagccggctggcgaggaaggcatcttatgcattccccagagagcctgcctttgccagccagctagttgcctgcgcatggctgcaagttcccaaaagcagaggtcagctagaagtggcctttctcacggtcttgctcctagcaggctcagcagggacctcttctgcggtggttttgaaggccacacccactcaacctaacctgttggcttttgtgtggagcttaagtctctctgtccccgagggatgctgtggctaggagtcctgtctaagtagacagtcagagcttttagctgggcttcccccttgaaagatgcctttagtggcccgccccacgtttgatgtcatcaggccaactctaactgatcctgccaggagccaagttggtgttaatttccatgctcaaaaatgttcacctacttcccccacaacaccaagatcacaagtcaaggtgcatcttgatagaatttttttctaagtttgaaatgaacacatcgtaggcttttgagaaaaatgctgtggaatcaggtgggcagggcttcactgagctgttgctggaaagggaaccagggttgtgggaaactggccttaggaggtagcaggggcacacctgctgctgatgcaccagtctgggtgcgaagcactaggtgtctttctacctcagccctactgctatgacagcacccactccactcacccccaaaaccttacgccagggatcttgctttctctcctttacagttcccttttgtaagatcagaatcttgagggatttttttttttttgtgtgcgcgcgcgcgtgcacacacacacacacagagctttccaagaaacttagataaaaagaaacaaactacacaagaaaggacagggaaaatgtggcatttagacttgtattttcagcaagttaacccagactttttgggggaggggatgcctggttctgtaggagactggactgatgaaatgtgagaggttaaaacccaaggcttactataaaaaatactctagatatggtgggttcatgtgtccttctttctctctctctccttttattttctttttcagataaggtcttgccatatattcctggctgtcctggtacttgctaggcagcccaggttggccacaagctcaaagcagtccttctgcctcagaagtccatgagctggggtcattactggctggcacactggacactctgctttggccttgtttgcctcatctctgggtggggtagctgggacagtggcagctctgcttctgagtgcttctcatctctctgcatccctctgcacctgcacagtgtcccgaaccacagaccacagacctccaaggcattctccacctcacctcgcttcctgctccctccacagacctggtcggggagtggtttggatggtctcagcccttggaagtcctcctcttggctcaggtctgcttctgctaatccccctggcttgttcaaagatccagagacaactaagttttcagactgctgcttctactctttgatgagatacaacttcttctaatccatctacccccttcatggggccaactccggcatcgccatatgtcaggcactggggatgtgaggattaatgaagcagccaagaccaaagcctgtgcaggagaattagtacaaactttgaatttgctccatgttaggaggggagcagctccttcttcctgggggtggggcggggttgttagaggatgctttcgaggtgaggcagctgtagggaaactcaccgtgtggccccacacattccactctagaaaccactcagaccactgacacagattctttcatctggaaatttcctttcttacaagttctttaccccccctttttttttgcaacaaagaggggagctggtattggctgaatgaaaactatccatgctgctggttacttaggcccatcagtctataagacctgccttggaggagcaatatcctttaagtcctccaggctcttctccatccatgcaatgatattatccttggatattaaggtctagcaataagagtgatgctccctgcctggggcatgcatggagggagaggtaatttataatcactttctactgtcacagttaaaatgtttactcatttatttttgtggtgttggggatcaaatccagggctctgcacaggctagacaagtactctaccactgagctacacatcatatcaccatttgacaagaaaaataatcttgtcaaatggtgatatgacggtgaggagagacatctttatctcaatctagttaaaggcgatcaccaagtccttcatgtcttaagaagatatatatatgtgtgtatgtgtgtgtgtgtaatgaaagttaattgttgtgccctaaaatggtctgaaatgcgtctgttgttgaagggtattgctatgctgccatatttaaaaattattaccctctgtgatttggtgagatataactgttaatgactccgagagacagagcaggtaacagggaggcctcgtccactgaccattaactattccatcagacctaatgttggccatcaatctcctgctgactgtcacataaacatttatgcctctcctaactcactgcttaccctctgatgggacagagggcttccttccagcagggaaacctcaggcaggctcagcttctagttctttcctttagcccaaggctaaaatcgataactaatcagcccctaccttgcagtgtcttttgtattgatgactttctgtgaccagtttgagagtttaatatgtgttcagccaataaactgaacaaatccctcgagagtagcaactatttaaattttttttctagagctcagaagctatagatggacacatattgacaacattacactcttggaatagacgctcgagagcacctggcccggcacctttatttaatgcatacaagaaataggcccaaggatgggagaatcaggagttttatcttctactcagacctcttaagggagttacttgaaaatgcctcttcagcagagtaaaggagtatctgacagaccatcacattaactccaagaaataatggccctactaagacaggggaagggaggagcccatctctcccttgaccgctgggctagtgttaagcacagctgcaagtctgttaagatcacaattggttttcatgctaaggaagctggctgcttgactgctgaggaagaaagagcaccagaagaaggcagctaaggcagtggaggcaagggatggcagcaagctgaggctaaagaaggatagaagactaagaagactacaaagggccagggaagggacattgcaagctggctgcagaaggctttcggggagttgtgaagtctttaggaacaaaggtctcaggccctgagccaagagcattgatactggctggtgttaaaggctaaataatcccaacttcctaggtctaaaacaacaacagcaacaaaactgtaacactgccaaggcctgaggaatcccaaacccctaggcctatacaagggttgtaacatttgagggctaaggatcttgttactggaggcctgaaggaaaactctaatgggaagatgctgtctgtggttacctgttgccaaacactgagtgggaaatgaaagctgccagtggccagggttgaggaatttctcctgactactcacagtttctacctgggtagagcaaaaataccatccagctgactggtagtgctacttagtccttccaggaaaaacagctgagagacaacttagcagcctaggaggcagccagtcttcattggagtaggaggggtggagggctctgttaaagaggtctctgagggtgtcacgaaaccaggacattccacacagtggagagtattactgggaaagcacaagaaattaagattttaatgggaaaaaagaatgcaaacaagaaaaacagagggtaattagtgtgttggcttggtagtttaaaccttcaatcccgcactcaggaggctggtgcaggagaattccaaatttaaggctgagccatattagcaaataagactctatctaaaaaacagaaaaggaagggaggaagagaaaaaagaaaagtcagtcagtaactgtagcagataaagagcctcgcaagagcattaagatccaagggtgaagcagcccaattagataacaaaccatcagacttcaaaagggagtggggagacttcaaaccatggctgggaaagaattttgaggccatattatgggctgggccatataaggcacgtttcgcacatcaacaagaaaaaaaaaaaggcagttagaaactccatgttaacaaaccaaacacagtttcatgagtggcatacaggagcccaaatatgaggccatttaaagcgtgacccaattgtgagtaatgtaagggacagaatgtaaaaaagaatctgtgaagtctgtgtcgcgtgtgtccttggtgcagtggtacaggaaatgggctctttggctctgcggtgggagtatttgcttagatacaacaaggtaaattcaccttctaaaatcaacaaaacactgcagaccacttgagtaacgtgtaaagactcccacctttacaacataaaatgcaaaacagcttagagaaggcagacagcacaagaagaaacagtggaatggcggcagactaagacattgtccccattcttctttatcctcatgaaaggacgacgcacatgctcgcctgatgccatatggcttatccgctgctcatggaggagagtactttctcctctgccctttgacatcaggctcggcatgagattgatgctgaacagatcttgtgaggttctgcctgaatcctggcatattggaagcagggtatggcatgccatgtgagacctaagttagaatgaagggtttgttagttttcattgctattgtcctggagtatgtgccaacgctgactcgcaggtagaggtgttaatatgctgactaacaagggtgggagtgaagagatgcttttatagttgacaggtaaatagagggtactagggtgaccagtacataaactgtgttaatggtgtactgggacaatggaacaatggcggcgtgatgggatgaagacagaacaagagtaaaaggagatgagggttgatgtaccaagctgattttgatatttcatagcagaaagtcaaaaaatggcatctaaaggtgaccagtcaggaaacatacatatgctctttgaagatcaggagaatgaaaagttggcatcattgtttttctgtctggtggttcatctctctctctctctctctctctctctctctctctctctctctctctctctcaagacagggttcctctgtggtcctggctgtcctggaactcgctttgtagagcaggctggcctcaaattcagagttcagcctgcctttgcctttgagtgctgggattaaaggtgtgcaccaccacacctggtcctaaagacagcctctcttgaccattcgtctgcctctggccattttacagttctgtgctctcctttttatcataaaactgtctctgaaagtgtccttgtctggatttgtggtctccagcatgctctctttttaaagttttacctttgtcactcacctaacttgcacttgtcagggtcaccatctcctcccggttgctagatccaggggcagtctgccatccctccttcctgtgccgatcattactggactcggtgcttattcctttctccttgaaatgttttcttcatttggcttcatgttccttatccccgtggctccctcatttcttttgcttctctctgcagcctctagacgtgggagttccccggggcctcgatcttactttgatcttctctcttctgcctacacttgctgcctaggctttaaatcacagcttcatgaggatgactcccaagctcagatccttatatctgtccctgcctcaaactccagagcctcatatccaacccagcacctcccttcccaaccacaaggtatcctggactgggcctttccagaagcaaatgcctgttttccccccagacctgcctttctcttaccttctccatctcagtgaatgtccctggcttgaaaccagactcacccttgacccttcttcattcacacacacccctgagaaatactcctgtctctgctgccaaactccactctagcctacacctctacctttcttcaaattattgggatagctgtgtgtgtgtgtgtgtgtgtgtgtgtatgcagtctgtttgtgtgcacacacatttgtgtgtatgatatggggatgctatttgtgtgtgtatccatacaatcagtgtgcacacatatgtatgtgtgtatgatgtggaagtgctatgtgtatgtgtgtatacagtctgtgtgactgtgtatgactgtgtgtgtgtgtgtgtgtgtgtgtgtgtgtgtgtatatatatagtctgtgtgactgtgtgtgtgtgtgtgtgtgtgtgtatacagtctgtgtgactgtgtatgtgtgtatacagtctgtgtgactgtgtgtgcccgtgtgtgtgtgtgtgtgtgtgtgtgtgtgtgtgtgtgtgtatgcagtgtttgtgtgaacacacatttgtgtgtatgatatggggatgctgtttgtgtgtttgtgagtatacaatctgtgtgcacacatatgtagtatgtgtgtatgatgtgggggtgccatgtgtgtgtgtgtgtgtgtgtgaatatgtgtatacagtctatgtctgtgtgcacacacatacatatgtatgatgtgggggtgccccgtgtgtgtgtgtgtgtgtgtgtgtgtgtgtgtgtgtgtgtgtgtacagtctgtgtttatgtgcacgaacgtgtatataacgtcgggtgctcatgccacggcacgcatgtagaaattagagaaccacgcaggcacccttcctcaccttccaccttacttgaaacaaggtctctgttggtttttctgctgcacacaccaggcaaagtggaccgtgagcttctaggaattcccctgtctccacctctcacctccccataggagtcctgggttgcagatctcatgcaaactctgctgtgctcttggattttacatgagttctggggattcaaactcttgtactgcaagtgtttttacccactgaaccatctctctgacctgctcgattttgagatagggtctcactctgtagttcaggcaggcttcctggcctgcaacattcagctttggtagcttctttttaaaattttccttcattgtgtgtgtatggatgttttgcctgaatgctgtacatgcctgcaccatgcatacagtgcctgtagagccagaagagggcattagagcacctgggactggagttacagatggtttgagcccccaagtgggtgctgagaatcaaacctgggtcctctgtaagagcagccagtgctctgaaccactgagtcatctctccagctctgtggtggcttctccaatggccttcctgccatcactgcatgccctttgtggtgtcttttagagtctgttctcaacatatcagctagatcaatcttttagaagtgtgactaagttagagcatttcactcttgttttaaattctcaaaaacaaacaaaacaaaacaaaataaaaccacaaaaactaaaccaaaccaacccctctcaaatagctcccacagcactcagtaaaatctcgagtcttgttataacttatacaacaccaggtcagatttcttcagtgggacattattaaggtcatataggaatcttacaggacttcaacaattctggtacctaaattacaaatttttaaaaaaagatacaggaaaaataatatatatatatatatatatatatattattgtttcaatatcaatgagactttggtgtttcttttggtgtataatgagttttcaaaacctgacaaaatccagcatgtgttttatgcctgcataattttgagtgtgattgttgtgtgatctgtactagtgtttcttctgagatataagttagaaactagctgcagccaagagtagacactgtgtgtgtgtgtgtgtgtgtgtgtgtgtctgtgtgtctgtgtgtgtgtgtgcgcgtgcccgcgctgtggggcatttcagtgatgaggaggtagtccactgatttgtgactgccttctgacagacctgtgctgcacacctactgtgtgacagccctgctttggaactagagtacaaagacatagtaggtaggtcccagcactcaggagctaatggtctccccaagaaggaaggccagtagatacagaatgaggtatgtgatttcttgagggtgctgtaccctatctgatatagtcggctgagtggtatggaaactggaagttcctgtttgtgtttaaaacttccaggcttctaataccagtttgttaatatatccctgaggcatgcatggtggctggtgacttagtgtcttgaagcttcagttggggttgggtgggtggtaggtggatcttcagcatgggaacatccctaccctaggagaaaggaatgctgatgtcacctggccaggatgggtgacttattctcaaatgggatggagacaatattttcctaattagaggcttaacatatgtattaattatacatttgctttatgaaagatcataagttgcacagaagaagaaacttttcttgaaaagactaaaaatacacaagaccagggtgatccttgaacatgaaagggtgggggccatggccagggtcctctcttaagcagagtattccatcagcttggtagactaagatgtttgaccttgaagcacagatgagtttggtttgagtggagaacattcctgaaacttccacaggtaaaacaatccaacttctctagggtgatggagctagagggccttccaaccgcttccatttacagatgaggaaagggctactcctttcttcccagcgctcatcccattttactatccatcaccacagcctcatgctttcctgcttggtcactaactatgtgttaaattaagggaatgtaggaggagaagtactggggacagctgcacagccattggaccggcagaggatggctaagccagagctgccagcaccctcctatcacataccccagttcaccacactcagctgtagttgctctgtttagtgcattcatgtagatgcttatatatgttacgacacaacgccacacaagtctgctgttgaaagtttgcaagctttgtgtgccaagaaaatttttgttcaggtgcccttgtgtcggagcaatgggtaagggtcctgtgtcttgtctcagaggcaaagacacgagtccctaactcagagagtgaagttaccttagcaccaccttagagactaagggtcattgtctggaaggctgctggtgtgttttctttgtaaaagaagcatcttcccaagcaggaccttttctcaatggggcagaatgacacagtgccattggcacacattgaacacaaggcatgacctcgacaagtgaactactctctctaaccctgcctttggcattagtcacatggatggcattgtcatacagaatgacaccatgaggccaagctgctggagtttaggacttcccaggtcttggtctcagtgtgtctgtggtattactttactatttcagtagacgtttggtgttgcaggctaagcacatctctgcccatatctcagctctgatctttgggtcttgcactctgaatcctcagtagttccccactgaactaagtttacagtccatgttggatctcagaggtctagtgagctgcagctgtgttttctgcctctacctcactgtctagtctttgcaatcagcctcctctgaaagatgactttaccactctagtgagattggctccttttttcctctgacgggtcaatccactcaagccattctctgcctcaaactctggctcgtttgtgactcatcttaaccctctcctgtgaaatcatatccccgagggtgggaacttgctctactcatcttctacctcctgtggcactttctgctcatcctaggggtatttgccagagtggagatacatttatattctgactgtaccgtggctgcagtagaactgctagagtttggaataagagccctttaaaggtcagatgcttggtccccaacctgtgatagtttcaggaggccatggaatctttaagaggtgggtcttagttaagccactgggggcttgaaggagacgttgggatcccaaccacttcctgattctatgcttcctggctgtcaaggggtgagcagctttcaatcacctcaggctcccaccactgtgtgctacctcacctgccacaggctgaagagcaacaggcagagccaaacaatcatgatcgggagcctctgaaaccacgagccaagataaaccccttcctttcagtccattttctctggtattttgttgcagtaggggaaagctgacaaaaacagagtccttactcattgatctgaggacgtccttatccaggagtcacaagcttccactcacttctcagtctccctgagctcgtggcaggtaggttggcattcccaaggctctgaggaggctgagggtgacaggggagtggtgtgaggtagcatgtgtctctctgatgagcctctggagtctcgaccaccaaaagaggaagtgtagaactaaggcccatgtacttgatctgtaggggatccgctggaaggctactcactacctacccgtcatcaaccctgccctttgaagttgtatttctaactactgataagtgtttaggaagtgaaggagctgatcaatccttttcaaaatttactactgctactattattatgtgcatgggcattccacctgcatgtatgtctgtgcaccatgctgagtgcctggtgcttgcagaggtcagaagagggtgttgggtcccctggaaatggagttacagattactgtgagctgccacatgggtgctgggaataacacccaggtcctctggaagaaccacaaatgttcttaaccactgatcatctttccagccatgagctgatcaattttaataaagctaacaagcatggtggcaatgaaacatccccagtattctgaaaatgatagttgtaatggttgtccaaccctatgagaatactaaaagctgctgaatttttaaacagatcagctttatagtatatgaaagataactaaagctgcttaaaggtaatgtcaccaagtaagggcatgtagacattctttacctcctgaaatgacctcttgaggaacatgttttgagtaacctaaattaattcatgagaaaacatcagacaaactcaagttgaatcgcgaaaactgtcatgaaagttagggtttctattgctgtgaagagacaccatgaccatggtgactcttaaaaggaaaaacatttaattgaggtggctcactcacagttcagaggttccgtccattatcatcatggtgggacacggcagcatgcatgcagacatggtgctggagaaggagctgagagtcctacatcttgcaggcaacagaaagtagtctgagatacagggtgtggcttgagcatatgagacctcaaagcccacccccacagtgacacacttcctccatcaaggccacacctcgcattagtgccactccctttgggggccattttctttcaaaccaccactgaagaaatttaaagatagacagttagccaggtgaggtggcacatgtgtaaccccagcactcaggaggcagacaggaggattgttcaagtttgaggctagctttgtctacacagtgatagacaagcatggtcttggactagatcctgtgatgaggctagccttgtctacacagtgattgcaagctttggactagatcctgtgctgaaaaagaaaaggataccagcatagacagagacagctgacaaagcagggccatgggctgtagacttgataagacagtctattaatattaagcatcctaagtgtgataactgggttataaatatgtaaaagattatctctgttctctggaaactcataccagcgtatgaaggcacaccatgaagtcagcagcctattcactagggatttcaaaaaaaaaaaaaaaaaaggatggactaggcatgtggcttagttggtagagtacttgcctagccagctccaatccctgggtttgatccccaacaccacctaaaacctaaaagcattgtggtggcaaatacctgtaatgccagcactcagaaggtggaggcaggaggaacagggcttcaagggcatcctcggctctcaactctgtccagaaaagaagaaagaaggaggaggaggaagagggggaggaggagaagggcaaaggtagaaggaggaagaaggaagaaggaagaaagaccgggcaaacgcagagaaatactggatgctggtaatctgatagagtagactggggttctctggaaaaaccttgaaattttttgccagtttgaaagtattttaaaacaaaaagttaaaaaagttacatagctaaaagccagatatagccaaatggttccaacagagaaattacacctaaattccaaataccatccctaaggcagtcacaccttttcttaacatgcttgttgcatggcatagatagcatttacccaggttccctaaggagatttctctaggggggtccgctattaaaactctaaggacacaagaagttgtttgacacagtttggaagtttgaggtgcctcttgccatcagtaagggcttgtcagtctggtgagtttcctgattgtgcaaaggcagtgcacaaggccagattccccctggtggcctgacaggtcctttgggaccaatcaggaatctgaatgcttcagccagaactggaccggatgtcacaggcacaacatcattgggatgtctttcttttcttggttattctccatctcatttggactccaggaatcattcatggggctcagagaaaccaactcaaaccagtagtcaatgagtcaggccaagcaccagcatcatgagccttggctgcttagagagatgtgtgggttgagtgcacaagaggaattagtcccggaatcaccctgtggcctgactcagaagagaaagagtaaacatgaccatcttaggaccaaactgctaggcttctggactcttctacagaaagggtgatggcctcatgccctgagctcagagatttggcctccgtgttcctcggtctgctgcccatgtctagatggagtccaataggacctaaggggctttatagagcttggagactggcatgggctggagggttaggtgacacaacagagtcatgggtttgtcgtgtattgatactgaattgcttaggcctatggtgggcccggccactgtgtgctttattgtccctgtggttcattcggcaggctgttctagagctctgtggtgggttctgctcaggccccagaaaagactcaggatggaggtcttctggggaggtagagccagggaagggaggggtggttggtccatctccctaggattgtttctggctcctcactttggttcttagggggcttctggggactgccaccgactatggcactgaagatggtggcagaacccagtttgtattgaaatcaggaatccactcttcccagttgtctggtctgcttgccgctctaactgggggtattctgatgtgtcatgtgggtagtctggtctttttgcaccttctgtgtgtctcctccagcttgtggcccagggcagagccccaagtagaattccagccatccctgttgagtgatgatctgggcagtgtgcctttgggactgaggcctgcattcccagcttccttcttcaataactgtgcttttgccatgatggtgccactgctcctacctggccccatttgaggtagggatggttattagtcctgctttcttgcttgtgatgagatggttatggaaatgaaatcaggcgcagggagccagccctgtgggagcccagctctccatcttgacctctctccgtgctttcagcttctgaatgcataagaagttctcccctcacaggggagaagcagactggggaacgggctccccctgccttcttagtcccctcatctatttccactcttttgtgatctgctctgtacctgaaggttgtcctctggggccgcattgccactccttggtcctgtgtcttccaaggaaggttctggctaggtggaggagaagaggggagaggttggggctagggcttctttctttcttctggctgttaggctatggccatggcttttagcctgcagcttcattctccaacccagccttctggccaccccttcaggactgggtatgcaagcttttgctttctgttccaagcttctccaatttagagtttgcttcttacatgccccaactggaccacggaaccctgggttgttagccctggctcacacagcacccccaccctctgcttttcatgaagaagttggtttctactttcttcctcctggaaactgggaacagccggctctagagcctgagcatcctgctgtctgaaaagcgtgggtggctggcttccagatggctctcggtgctcggtgcttggggtgggggatgccatgatcccaggtgggctgggaagagactgactctaggaggagtggcaggtagcattagagggtgcagaataggactccccagcctgtctcgtcccgggacagtcctggatcctggttgcttggcttttggagctctgtgccacctgctgttgacttgagcacctccagcgacaggactcagggttctacttgatctcctggggaatgtcactccttccctctgcctggagccctcattttggaaagtgcaacatctgcccagcccgtggcggtgcacagctgttgctcctcacttctccagtggcaagggaagctgagggaagccaattctctctgccagcagtgtacttcccactctgaggatccaccattttgcttgcttgccttgctcccagtttccctcctgtggagccggagacccagtctggaatggaaaccattgcaaggtttgattttccttcctgtgctcacagaaaaagcctccagtgtttgcattgttccaactcgcagggatcccttgttatgagccaagccatcacaacactcctatcgtgctttgaatcttacaaaagacgccaaaaattagtgcatcttttattgaaaagcaccccctttcccagccacatcaatggcatgcttaaaaagcagaggttctgactgggttcttgtgaatctgccccccccccccgtgtgatttgtgtgcagacttctgagtgaacaggttttataatagagtcagccaggctaaatcacagtggcggaggcttatgcaactgctaaaaacctatgagttaaaaatggaatagtcttgcagagtggggaaggtaataatatcagtgacgtgaaaatagaaagtcagaaatgagtatttcagcaatttgagtctcttagccacattccttccgcaccagaagagtttggtgtcattttccagaatcaatccaaagagcaacctcttattagagaagtcaaactttgctttcatggagccagccctctgctccccattaatccagagtcaagagccccttctagtgactttttgccatcaaacacatggtgtgttttgttcaaatccctgcgttcgttaatgcccataaaggaacagattttagattttttataagtgggtttttgttaatttgctattttaaaaatacttgtgagacctttactgttgccatggtgatataatttccataaacatgatttttgtggggagttttgcacattgaaggatgaggttgatatgcagtgttggggggaaagtaggtgttgaatttggcagcaaatacattccaagaatccatgccacagcagggccctgggtctccataaacacactgacaccttcaggccctgggaagattagaaaaataggatgaaaggtcacaggctttttgctggccacttaacctgtccaggtcagaatgacccaaggtctttccccaaaccactaggatatcaaaaagccttacatcgctttgagccacccaaggagtaagggctctttttctctttaaccatgttttcccaaacttccacagagtgtattgaactgttaaagtgcaaaaggcttgcaaatgaagccgaggggggaaacagagctgttaaacaaacaaacaaacaaaaaaaaaacattgactaagaaatagtttctcacccaggaatgccaaggtttaaggtagatggcctcagtgaaacaagcactccaaagttgcttgtactaaaaagcaccgagccctcacttgggcccagggtaactggaagccgagtagaagcctggctccccctccttcattattctgtctcctttggctcagacccctgcttgactctcggagacatggtgatccctcaaagagtgcctggctacctaactggtctcatcactttggattccaggaagagcaaagcttcctgggacaggcccccacctcataccagggtgttatctacagcggtgaggctgtaccttagagcagcggcagtcttcttctgagagagactaccttgggggacttatgctgaaagggtgatggcaggaccacaccttgaccaagactgcttaattatgttctttcttgctgtccctcttctcagtgtggccacagtgaactaagtctgctctctctgttttgtttgtttgtttcatgtttgtgtctttaattggcacactggatgggtggtgaagcccagcctgcctgttggggctgccagaactgaggctttctctctaggaactccagttacaccaatggcactaagtggcatcatcttttatcaataggccagccatcagtgctgctgactcacggaggatctgtgtccccaggagtggactataggagaggtggagggaggagtggggcaaataagaaagggtttgaaaggccataggaactgaaagtgactgtgtggtagcaggactctcaagagaatgggtcaggatttgactcagcacggcctaactgaacacctgggcatagacaaggggtttgaatcatccaaaactatgactcatgaggaattatgaattactagaaagccattgtgttgactgcagtgccagaaacacccaagagggccacccagaagacgaggtacgtgatagtgtctggccaaacagaaggtgtgcgtgccagatgtgtgcgggtgtgagcatctgttgccattgttctgtgtgtgcttaggacgagtgtgtgttgggaagtttgtaccctgttagaaagatgcatcacctcagtcctgtgagtctcaccctgtggaaaaggcctgcagctacccccttgtgcagatggccagactgctggcaacgtgtgatctgttgatgaatgagacatttcaggtaggcccttgcactttcataacagtgagtgagaccagggcaggccttatgtctgcggtgctctggactgtgggtcacactaagctccaggagagatggcttcctctcctgctttcccacctgtccagggcctgccagggctgcttaggggacttcccaggcattttggatgtgctctaaaatagcccagagtaatttggcagggaaggctgcgggaacgtggcttaccaccctgtccagggtgggagtgggaaccggtacatcgcctgccacccagctccaggctcttcccacaacacatttaattgaaaatgttttaaagcatccatagctggcagcttggcagggaccggtgggtggccaggagggagaggatcctgctgaatggggaaagcagtggcctgcacagggcctgtcttcttctctgatgcccactgtttgggctgagctgtgggcagaagcctggacttcaaggtacaaaatccttggggaagaaagccagctggttccgtctctgagaggcaagaagcagtaacaaacccatccaactgctccccagaggagtgtctgctgggcagcatccctaagctggctcccagtgagggcatagctgacggtcatcagtcaggagtccagctcactgaggtagttgcggggaggtctgttgtgtgcaaaaagttatgtgtgtccttccccaaatccctatgatctttttctggatttatttgtttatttacttatttatagctgagtgctcgctaacttgcaccctaccacatgatagctgtgtgcttgtggtcaagtgacctacctcttttgcatttcagtttttttttttccttttaaagtttttgtactttagtaatctttcctgcctccaggttacaatgtttgtctcctgtgtcttctggaagtttgatagttttaggctttacactgtttctatgtgtacctcagtttcttgatctggaaaatggggagaatagtccctacatcttctgactctcttaaagagagctaatttgagttattatatatacggccctagaataaatagtactttgcacacagtggagattaagagtcattgcccattgaatgtcactgtggtaaagtcacctcagcctctgtagtctagctctacaggggcccaatgctgtgtgactcaggagggccactagaccatgggctgatccagtggaggaaaggttctcattcagactgtgtctctgagcttggcttggaacacatgcttagttgatttgaagagatacagctgttctgtacttctatactgctgacccctggcacgagggacatcagaaccccctggaagtctggcaaagtccccaccttcagagaggctgttgtagccagcacaggagtggtgtgggggtgtggtctgcacagtttagaaagcacttctgggaggcctcagtggaaggtgactccaaagcctgggcttggggaaaggaagccccacagtggttgtttctgacagcagcttgtctttgtagcacctatgtatgcccgtgggcaggaaagcatgggcgagtggggacccacatgggaacccttatgcctggtacagtcaacccagaagatccgagccttggggagacgaccactgggagtgtaagtgcatgtggtttaaatccaactgaacatggaactgcttggaaaagaggggtaaggttgggcatcttagaaatgcaagaagctactggcggacagagccatggcttactggtcattcagagtcgccccagtaagaccaccctagagcttcaggctgggctggccggcactgctcatgcctcccccttgaaggtcccccttcccaagccctgcttgatgcttgcagatgaccatggccgcgatgaaccttctctaccccaagccattgctccacactctggaagtggctcctctgcataaacggagcatccattgggttttccttgaggttcaaaatgtggcctttggcgagcagctgttcacataaactaaacagggcccaagaaaagagtggagtgaggaggaatgtgcttttctagagcaatgtttaaagatacatctgggatttgtttcttagcaacagggctcatccaaagcacactggcagtgtcagaacacccggcagtgctcgatgcccgcaagcacggtgtaaaataaaataaaaatgtactgagcgggagccaggagccaagcacaactcttccaacaggtggaaaaagtcagaaccacaaacagatggagatgctatggggtgagtctagagcaccagggtgggtaccagggccaggccacactgccctcctccctccctccctctcacaagaccttccttccctctctccttccttccctccttccttccttccttccctccctccctccctccctccctccctccttccttccttccttccttccttccttccttccttccttccttccttccctccttccttccttccctccctccttccttccttccttccttccctccctctcacaggaaggaaaagaacttcctttcctgtgaagatcataagcctgcccctcctctggtctccatccttcccagcccaggagacccaatatccagtcaaagggcaagcccgttagcctgaagaatgggaggacatagagggaaacagtcagagactcagaatttcttagccccattttgtgccgtcagaaccctgtacagtctcgactcctcagaataacaccgttgttttaaaatacgttttaaaatgtatctaataggttgatgtctcaaaacaccccagtgatatcagcaaacagttgccagtggaagtgttatctgtggtgacattaaacacaaagctccagcccctggagtattgacaactgtaacttgaagtagtggcatgaagggtggtttgagagcgtggcttcactgatgaatagcagcgcataaacttctgtccaggcaaaagcttagcgtctgtactcgcaaggaaaagagatgcttaaatcaaggcagaggtcagtaaaacttgaggcgggattttgttttcagtgtctcggtgtagatcctggctgtgtgcaccaggccacccccatttcctgtcccctcctcttcttcccacacttcttccataccaacactgccttgtgtgcaccggtgtgtacagacagacagacacaagaatgaaaacaggttaggcgatgtaacaatttcagctctgtaagaacttgtctctgtgccgttcggtaagcccccggtgttacctttccttagaaggcagaattcacagcacaggttttctcgggtcaaggccactggaaagtcatttgcacatgcaaagagaactcttgggtattcttggaatatttttcagtctgttttccccctcaaatctacctcatttatttaacacttttgataggcaggtattaagtgtctgagatgcagaaggtcctctcctacatctggggtctacagggatattcttaggaagctgcactccagtggaccccaggaaccctgagatgggagagtgaacctgtaacatttcaccacctgggctggggatgctcatggtttgtctaggctccttttaggagctgagcatctcagttaggtttccagagacctgagctgcctagggactgtcttcctggtacccaggtggtctaactgcttggcctcagagaagctatcccagtctctgagcaaagacctcagaggggctctgctccaagaggctctgacacggcacaagccggaaagtagtgggcttcatggtgcctagccattctgaaggactggaccacggccacaaacacccttgctgaagggacccgtgagaagactctcacttcatagatacagacactgaggcaggaatggtgaatttctcagggaactattcacattagttagcatcttttggccctttaaaatctattgaggaggggctagagacatggctcagtggttaaaagcactgaccgctctcccagaggacctgggttcaattcccagcacccacatggcagttccatgtctataactccagttctaagtgacctgacaccctctcacagacatacatgcaggcagaacaccaatgcacataaaataaaaataaattatttttttaaaaaatctatccaggagtctgaatgtcctgcatctgagctgggaagtcagctctctcagtgagcaagcagactgtgggagtaaggcacagggggacaagtggtgtggacaatccctcccacccagtgacagttaagtgtccagcatcagggtgaccttagaggctgggtcgagtatctgggctccccaccactggctgcagactactcaggggggctctgtgtattacggtacccctcacaccagacctctgaagtgggtgctacctatgactgccaccctacctggcaggaggagattccgaggcatgaccacgggaaacctggtagcccggcactaggagccagcccttgatttctgtccaatactgcctcccttgcaaatcgcactaacctcaaaggaccacacaaggcctgcatggagtgggccggcacagagtgagccctagtaaagatgagtgttaccatgctaccctgtcactctgtcatcagataagatgggggactcagtcgtgcagaagaatcggggaccacctcgacctgaagggttccagaaagaccggttgacctgagttgagggtgcaccaggttgctgtgcacctccacgccattggagcacctcgagcaggtgaagtagacggtgcaggcaggagacacacgcaggctgcacagctcccagctggtagctgggtggtgacgagcagaatgaggtggttgagtggccataaagagtttggacagagagggtgagaggactggcacccagccagcccttgcttccacagtgcctgccagcgagacacgagagcctttcgtgctggtcagacgaccagattccccatagtactgtttctaagagagagagagagagagagagagagagagagagagagagagagagagagagagagagatattaaaaacaagacaaaacacacaccaggcatttctacagcaactgcgtgctgtgcccagcctcttatgttccagacctttttagcatcactggagccccagtgactcctaggactgaaatgttgaggcaattgtgctggattcatgcccctccctctcatccgctgcttcttgccctaataggaaacatctcagcaagtactccccagggcctgctttggcatctggttgggccaagtcctgacttggttttgggttgcttcctccatcccttctctgcttgtttagattgctggaaagaaaaccccctggtgtgggtttatggagtccctttgtgttgtctcttcctactaagttctgctttgggacagtgtcagtgacggagcttccccctctgcctggtgatactttgaatagctcagtgggcaggaacatggctgttcttccagggatttctcagaaggtatactgatggctgtcttactctgggtctcagaagaaaggagatggcaatccttgggggtgctggctagaaactccaggagcagggagaatccatgtgtttgtgggggacagctaggacaagaattctgggctcccaggcctggaggcatgtagcaggctggcagccctggttttggtgtccatgcaacccctcctcaggggctggcctatgtaatcagcttgtcattcatatcaggaaaggacttcctgtgttctgaaagttgcactgaaatgaatttcatcggatcgaggctgttgtatggactgtacatgttgtaggaaagaagtctcatggtcagaaatgttctccaccggccttcagctccacactacggatgttaacacacacaaacacatgcatttacacataggcacacacatatacagacaggtacataccaagaattgctcatggatagataatgtgtgtgtgtgtgtgtgtgtgtgtgtgtgtgtgtgtgtgtgtgtgtgtgtttggggtttttgtttgtttgtttgagacagggtctctttacatagccctggctgtcctggaactcactctgtagaccaggctggcctcaaactcacagagatctggcagcctctgcctcctggagtgctgggttaaagatctgcaccacctagcctgggaagctgagggtaccagggcagtttgtccccaggggagtaagaacaatcacaaaggacaggaggttagtaggtggctccatctgtggtaggaacaactattgcttttagaggcttcagcccctgtctgggtcagatgtgaatccatggtctataggggtaggacaaatgcagaagaaatgccactaacgcatggacaggctacctagaggacagcatgggtggaagggagtgggtataaaattctcagccattctccatcccccagtgttgcctcaggtgggtgcaagggcctgggttacttcttgcattgcatccatggctcgggctgcctccagaagccttttctgaaaagcaagttatcagtttattgttctgagtcaaggctatgccactaagctgtggggcgctggtcccagggaacaaaggcaccagagctgggcctttgaggccgtggctgtttgccagctccccagcctgggcagcatcttgctctcacagggcctcctcaattgtctctcttttggtggtgcctgggacagaacccaggacttcatgcttgctcaccaagttcctctctgaaatgctctcctagcaattagtctcctttcaaacaggcactctgatgagtgccggggaccccacctgctcaccttggagtggctgaggagatggctttgctggggtgagtgtagagtgtaggaatcagagctgctcggggattctgtccttggagtcaggcagatctcctttttctgcatctcatagtggcaggtgctgactagatagggtaatgaagccaggcttccctctgtctgtccagagccccgctggggaggaggatccccggaagtgagggccatggggaaagcctgcagccttgcctttggctgtgcttctgggcccatgtgcacacagctggtccatgaaggccactctccttggccatctgagtcttgatcagctgtccctccaggaacagtgttttctcttttgactccccttccaaacaatgaaataaaatagggacttaactgaaaataaaattgcattttgaaagagactcttagggaactaaagataaacaatgacaagaaataggtgctacaactgtgtgtcaggtgtctgtccccctaacgccccctactgcctgtgggttgaacccagggcttttcgtatactgggcaaccactcattggaactacatcctaagcccattacttattttgtattttcagacaagagtctcagttggttacccaggctgtccttgaactcactgtgtagctcaggctcattttgaacacagcatatccttaccttagcctcccaggtaaccaggattacaggcctgcaccaccaagctgggcttacagctgacttttataaaatagcattattatcagtgtgtgtgtgtgtgtgtgtgtgtgtgtgtgtgtgtgctgtgaatatgtgcgagtgtgcatgtcttagcacttatgtggaagtcagagggtaattttgtgaagtcagtcctctccttctacccttccatgagttctgggataggatgggaattcaggtcgccagtcctgcatgatgagcactttgcctgctgagccttcccgctggctgcagagcttggtttcctatgccaatggacacacatctgtgctttctgcacactctgagtagtatggccttgctggtcccctcctgtgcattgctttatggtctgtacccgaagcctctgccacacttgccaaagattctggtcctattctcaccacatcctcttgcaaatggcttgtgaaatgtcttggtaacaagctgaaaaaagactgcatgagacaccagttcagagatgtaaggagatggccagggagtaggatgctggactagctggaaatgttccaatctaaaatgccagaaggctcaggcatggaagcttggttgctgatgggctttggtgaagttactgggtttgggagatttgccttaatgggttcattatttggtggcttttgtatgactttccctagggatatatggacaaatatctactcaccctagatagtgcactactgagaggccaaagaaacaacatccaagtcccatctttgaagcaatgggtttattaggcttccttacaagagtgtgggttggatggtacaaagatgtaggtggcctcagaacaattgtaacactgtaaagtcccactggcttgggtgaccactgcctgtaagctgcatggatggagttgtcccttcaggcacccctccaccctccgttttctccagcacctcccaagcctgagtgccagtggcagaggtgcagggggaaggggctggagtctcaggtgaagatctgatgccagccccatttctatggggaatgggaatagtcccaattttgggaatgtctctgtgggtaatcatagccatgctgacttcaaggttgtaatggccaggtcaggccaggctagtgttctatgacaatgacattattgaaaggtcattgaaacctggggtgggagagtaccaattagaggaagtaggtcactgggagcattccctggaagggaactttgtctttgcccaccagcttcatggataccatgagaggagcagcctgcttcccaagccctgccccaccaagatgctttatcatgaggtcacagcaaggaggccaagcaactgtggactcaaacctctgaagccatgagccaaaataaacctctccaggaaacagccccatcttctccatccctttctcttcctgtcagtcagagggtagctctaagaagagtgtccatgttcatggctgataacctttctggccaagactgactattgataagaagtgtcaatgaatctggggccatgttttaagataacaatatcccacttgggaaaaaaagctgaaaacaaaacctgaatggtttctctgcttgcgtttctagcaggtttcccctccgagcatgaactttgaagactgcaatgcagcatcattttaatctctttctatatcccaaggcgacataggtttctctcagggacccaagcttcttttgtgcagccagggcattgtgggtaaagctgagccaggacaggcttctttacttaaaatgatagtcacattctgtccgtgctaatggttgattcagcatgtgtgtgacttaccaagtccagtctgggtgactctcaggactcggttggaatgtcgggacagaaatgctctttcttctccggacatgaggcacttggatgtgaaaactggaattgctgcagttggtcttgtcaccatgagggatgtaaaaaactcatattgtggagcatggtgcagggcgatggaaaacattgggtttataatgcattattgggccaagaactcaaaccaaccctgaatgactattaacaacaacaataataaaacccttactaagaacttagcttgctccaggaactttaatgtgtaatccttattaagttcattgctatgtgtgcttggatattgttccatcccacgtttttccagggaggaaactggccctttaagattttgcagagtgaggccagcaaatgaagggccttgcctgggctcacacatccagtgaaccctgactcagcagtgaaactcagcaggctgacctgttagccaaactcataatcactgccctcctctgcctttgtgggctttcccagcaactcactggaaaattaaacccatttcagttggttatgttcaaaatcagggtcccagtagggaacccttccctgtagtgtggactactccagtgttgagagcagtaatgccatcctggtatggaggaagccattcatgagtcctatgagccctgtcaggaagctatccttggtactggggctatacacatgtgctcatgggctaccctgtagggcgtggtgcctgggaggtgcatgacaggtgtatggggagcctatcagccaaagaacacctgagcctaggccacactgggcactgtttaggtcctctctctctggtccttggggggctggggagccggctcagttgagccacccttctgttgttaagtggccacctgagtaacccaaatggctcctcaagatctcttgcgaatgggctcctcagaacccccaggtctttctttttcagcactgggagcctccgggccagggattttcctggaagttcaaggttcttaatgggaactctgggccagttccacggcaccagtcattttctgtcagatgtctgggtgtcatctgtcccctcccttgactgttacaaaatcaccttctctgtagccagagagatgccactgtaaagtggaatctcaataggtgcttgtgacgttttatatatatatatatgtatatatatatatatatatatatatatagccaccagcagttcagccactgtaaagacaatttttcattttgttcaatgtgtgcctgtccttgtccacacgcataaatattttaaataatctccccacacagtgtgcagactatttttgtaatttcactatgaagaactttcccatgtctttgtgtagccactatcagacgtttcctggctgcataaaacttggacataatgaagctgacatggtgaacttagcagttacagtgtaattttttaaagggtaaaagtctgggaagacggctcctgggtaaagtgcttgctgccccagcaaggggacctgtgtttgttacctcacgatcacactcacaggaaagccaggtgcagcagcccacaccttcaacactatagtagtgggcagagacagatgcattctgggggttactagctgaccagtctggatgagatgccgggatccagcttctcttagagaccctgcctcaaaaggtaagatagtgagtgatagaggaagacacccaaagtcatcctccggccatacacacgcacaaacgagtgagtacacctcattgtatttattacacaggtacacaccatgcaacacataatttttttttaaaaaaaaatagaatgagcctggcagtggtgacgcacacacacacacctttaaacccagcactcagaaagcagagacaggaggatctctgtgagttcgaggccagcctggtctccagagcgagttccaggtcaggctccaaagctacagagaaatcctgtctcagaaaaaaaaaaaatagaatgaataacagtgtcatcagccactgtgattatacctccaggcttctctgatttcaatttctctttcacattcagagttaataagctcgcttgccaagattctgctctagtccagactactaaggagaactgtcccctggcagtcacttggactgtcccctggcagtcactttcaatggccctcactcgccagtcctcattagtttgcattctgagcacctcacacattcccctaccttgctgtctatgcagcagaccctgagcattacctgtaggtgaggaaacttgatgtcctacagaccatttgagtcctgctgtgctcacagtgatgccctgcgtccctgtctccacctctccagtggcaggctctgcagcatttgcattctgtgggagactcttgacagtgaggatgctggccttctgtgacggcatccgtagttttgcccttatcttggtccccagaagatgctgtatacacgctagcccccccccatgtgggggctggatgaactgagtatggcttttaggaaggggcagccctagtttgagcagctataagccaccaccacttgcctctcacagctttggtggctgcaagtcagagagcaaccagctggagtggctagagttcatgaggaccccttcctgcatctattcacagaagggagactcagaggacactgggagctcgtgtgggtctctctgtcccctgtgaggagggcctggttccatcatgggcaccaatcccagtacctcagcccaatcatcccctaaaggccccgcacgctgataaaccatcctatagagatcaaggtctcagcatgtgaacttggagacaagggctcaagtgttcatccatgggaagcaacttcacacctgggaatgcaacttgcaggtctggtgttagtctgagaagttctattgttacatgtcatgtgtcaacatggggcctcctctgtgaccaaagggaaggctgcagggcacactgctcttctttcttcttggagtgtgtgaccatgatttcagacccctgaaggcagctgcttctagcacttctggtgacagtttgacaaccctggctcccacacacttgcactcgggtggcagggacccaagacccctgctgtctctggagttgataagcaaagggtgataaaacatcataggaatctcatcatgtcacccaccagatgagtgaatggggtcagtgacaccattaaggaaaaaggcagacctaggttcctttctcagcttctatagtgcccctgggagaacgccatcagcatcctccatgtccttgatcacagaaaggctcctggcagctgccagcctggatagggcccctctctgcttttaatctcagtgcctctccatccgtggaaatgtcatctggccaggttataaattcttgggcaacggaggctgcctcatcctcttcagtaaatgtcaccgttgacccatcccccactctgtcacctacccgattgtcctcagtgaagcacatgccaggtggggtaagaacaaagcagagtgtattagggccttcacactgctctggtcctcctgcccacatcccatgcctgacctaggtgtgttctgtgggattgaagcccaggctctgtgatgagactcagcatcctgtgaggttaaacttctgctcatgcttagcatcccagggagacccttagggacacctcaggtgcctgtccctgctctgcagctccccacgtctccacagtccctccaggtccagagatggaggaggaagggaaggcagagggcagagattggttaacaagccccgggcagctgatgcaatgcccaatgccattaaaattaatgacctgttccagctgacttggcctccagcgggacaatcaacctcaagtcaaggtggaagcattgagaagggcggaggtgggggctggtctcgtctccacagtcctcatcctcagaaggaaggtcagtaggagctgttgacttcagagagaaccccattaggtacactgagatggatggtgtcagtggcatgccagtgtcctcatggatggtgaggtatctttatgaagacatctgagcttttggcagagttgaaagctgcccattgacccttcccaccactggtccagagtgcaggtatcaaaagcacaagtgaactgttttgaagaactctgagggtgtcaagatgatggaaacatgagatccactcaagcattcctcacaacataagcaccgactctgacatggtcttacaagtcccttgatagtcagggtgtgaaactgtggacccaggtgggtctatgagatgctccctggatgaacgacttggcacagctccataggaaggcacagctgtcctccaggctggtgctggctttggaatccagggtcttgaccttgctaagtgggcattccactaccaagccacttgccaacccagttgggtccctccagttctatctccagcatagctttcttctcagactttgctggagggtgaccgtgctgacatgttaacaggctgtggccagaggtaagtgagcctgtttgctttcaaggaggcaccaaatgttgtccctagggtttttatgcagaaatgtttgtggccttatagttctctttcccttggcctttgcttgaggactggagcttcccagggttgagtttgtccctaatgcaatccctctttgcctcattctgccctgaaccaggctgtcctcaaagggatgtggtttgaacttccaaatggctgcgcagtagggttggggcccccttgccattgtcttcctgttccccaaagcttatttttcagtcaggccctgaagacacatagctgcattcaactaagtgatagagatatttagctgtcctttattaccaccaatacaacagcagcagagtcagctgtggggaacatctggggccaggcctgacttacaggctagtgcccagggccatggtttactgtagcaacagcagcagtggaagcttcactgaagggcagaggggcaatcctgcccttctccaagctccaagaatcagtagatctttcctgacccaaacccatcactttctacagctcccatgcgatggccacaagatgctgaaccccaggggagtgcaaaagttggacttttccattcccccgggctctattctcataagcagagccccgcccccacccccacccccagaggggtgactccatggcttactttttatttctgacagaagtgggggagggaatggaggcaagttctgggaactctgcccagtgttccaccccaggcaagccctttggggacttccacggggcggaagagggcggtacagggctctttctcctctcactgcctagctcagacctgcatcctgagttccttggggaagttgtgcacagatacctcatcaggtagaatggcggccagagggactgtggtagcaaattggtgtggcatgtgttcggggtgactctgtgggaaaggccgagctccgttacagccatggtaggatgtgtgtcccacatccccatgcctgcatgccaggtgatctgtagcacagtttccagtgtttgatggcagtgtgttgtcaccatttctctgtgccagttggtgctgtgctcacctccagaagcagcatgcccaggccccaggcatgaagaagctactacactgatcaaaagggcaaaaccacggacatgggttattgataaggttgagtctctcttcctttttggtgtgtgtgtgtgtgtgtgtgtgtgtgtgtgtgtgtgtgtgtgtgtgtggtgtttgggtgtacacacaaatatatgtgcaggtgctgtgcgtgtggaggccagaggaagattataggtatcctctattgttctccatcttggtttttgaaactgggcttctcactgaacttgaaactcaacatttctaggccagctgctggagagctcttgggatctgccagtcttcatcctggtcacttcccctgctcctcttccccccacaaactcttgtggatgctggggattcaaactcaggtcctcttgcttgcacaacaaatgctcttacccacccagtcatctccacactctggtggggcagtgctctgatgctgtgtctgtgaggcaaatctctgcacccctcagagtgcgtattctcaaatctagctgcccatctgtgtcagctggggatgcttgttttctgtgtatttttggtgctgaggatggaacccagggcttcatgcatgagagtgagctaaaccccagcctctgttttgcggttttagatcagcaattcccaaagtcatccttgtgccttcgaaggctggtgttggaatgctagactccacattttcagaagcttccatgtgcaaactgctttggattctgcctcagtttcttttttctgtcactgtgatggaatgccctgaccaaagcaactcaagggagaaaggacttattttagctgacactccacagagctgtccatcatggtggtgaagtaaggcaccaggagcttgaggcagcgggtcagtattgcatgggcagtctaaaagccaagtgatgaacaaatgctccaccactgctcagctctcttgctccattttattcagctggggaccttattctcagagaatggtcccacccacaattacaacgaatcttcccacatcagctaacacatcaagaatatatcctacaggcatgcccagagacctgtggcctgtcagtttggcagctttgatgagcctccattttctgtcagtgatgacagatgcctaacttgagctgggcatgatgggacgtcatgtaatcccaacgcgcaggagactgaggtggagatttcaaactggtagcctattttagagttgtttttcttggcaggaagagagaagggaggccacagctacagagacagagggtcatagcctcagtgagtgacagtgggtggggtggatatatgaataccgttatgtgcgaagcacttgcagggtagagagaggagggtcagggtttcaagggcagccaggctacctgagattctgtcttttttttttttttaaagtctcccccattttgtgtgtgtctgggagttgcatgtgcacatatacatgcttgcatgcttgtgtgtttgtggaggtgcctgccatggagcctgcaggcccgagtttgatccctggaatttacatggtagaatgagataatcaattctcgcacatggccctctgatctatacacatgcagtggcgtgtgtctccctctaataaatacataaataaacgtttaaaacaaaagcagcgtaggtagagggggtagcgttcgctgaacacaccagctccgcagtaactgcatctgtgttattttcacttaatattttctcccacgcattcggtttcctctcccaccatctttttacatctgcagggttcacttgtgcaatgctgtcagcctgttccccacacatgacacaccaccagcagcaaaggatggtgccatgtacttcttaaatcccccgtgtccctgtcactgtgcagagggtgcattctccttccagggacgagggaccccaccgatacctgctgtcagcctcacttccttaaggctcctttcccgttgtagcatccctcttctgctcacaactccccagggctctgctttctgcaggttaggcagaaccatatcccagcattcagagtcctccggtgacccagctgttcctcatcctcatggcagccgctcacatgactgcctaagctcacctccctctccccactggatgggtgggtgtcctgtcccaggccgctcatcttcccttctgtaactctgcctaggcctttaatctttccagtggagcatgggtgcctgtgtcactacaggctgcaagggcaggactgtgttagtgcctcaagtagcctacacagacttgcgaagggtaaccttgcctcatcacccagaaaggagagccctcagccaccgtgagcccctgctggactgtccattctgtgaagaccagagcttggttttacagctcccatagggctgccgcgctctgtgctaggtctgtgttgttggtgccaggccagcctcctggttgtcatgatggagcgagcttcatcattcctcaggatgacagggttgtttggaaatgcagactcctaggcacttcaggcattccggggtgttggcgagcctgggtactgtgtctgtaacaatgctacaggtggtgctatagggtctgacaatactcagcgcaagatttcttctgtggcctctgcggtctacctgtgtgcctttgttggagacctgaaagcaaaggagatagggagatggggcggggccttcattgggggttgcagtttagatgaggagaagcgtggggagggtcagggtgagaaagcagcactggactcagtttccctcagccttgaccacagtaaaacctgtgttccagcaagctggaaagagggggtggagaaaccgagttcagtgggaagtgaatggacagccctggggtcatgagaatggtccccagtccacgggccaatttcccaaatgtcttaatttagatcctggcctgcttctgacaggtccttgagccttggggtcagagtggggtcagcttgttattgtgaccttgagcaacatacttaattcccaagtctctatatgtaagataaagtggaaggccggacacctgtccctaaagatgttgtgtcccaacccctacacctgcgactatgtgaacttacgtggtgaagcaggggatcttgagaggtgagattatcaaatgtgcccacacataaggcaagcgggaggaccaggctcagggttggagttacccaagcgtgtcctcacatagggcaggcgggaggaccaggttcagggatcagaggacagcacatcaggacagggagctgtgctgctggctctggcagctgagcaaagggccctgagtcaagaccacaggcaactactagaagctggggcaacaggaaatggcaactaacttggaaacctcactgagacttccctgacctccaaagcagaggaaggatgcacttgcgtggtgggagccactaagctgtggtaactgttgtgacagcccccagggagcagtcatagggagaacaggcagagtcattcttggggtggggaaagctcacatcagagaagagctatggccaagcaaagttcagtgaaccgcagtgtcttcaacaggggaagacagaggtggaaaggaggaaggggaggggaggagaggggagggaagacccccccccccaggtggctctttttcctacacccctccccttggcttggaatggttgtgggaacatcagggatgctctaagactgtctggctgcagtcctgcactccctccacaggtcccaggtcccagtcccgtcttctaacaatcagcacatgggctgagattacttcctggctctctttctccgtctctctggaattcagcctctgagactgacttttgggtcacccaatgactcctgttttccagaagccacaggcttggcgctggatcctatgggcccctgtgtcacacctcctccagatggcgccctagtctctacaatttggagacacactgtggctaggacctgcggggcagggcagagccccggaggacagggtgtagtactccctgcttctctctgatccctggaggctgagcggtgcgggtggactggcagccttatagcctcccctgaagctgtcccctctggcctctcgcaggtacgttcgtctcggccttcaccgtgctgtgtggagcccgcactgacctcccagacaggcacgtgtgctgcgtcttctggctgaatatcgctgcggccctaattcaggtgctcacggccatcgtcatggtgggctggatcatgagcatcttttggggcatggacatggtcatccttgccagtgagtaacggctggtgtgctgagggcagagaggggcggggtctggtcagccgggaggaacaggaggcctacacttgtcggccctctaatcccaaagacacccgtatccttggacacagcctccaagggcatacctattcctctgccctagtgccatggctgcctttgcagaaccctctctcgaccataccagccctgcagggtgggtctccaagggagggccctctccaccaaagactccactctctgcatttgccaaggaagcagttctcccactgaagctgggtaagctggtgaattcagaatgaggttgtcctctcggcccatggttttgtgtcagcatcacagtttctagaggaagagcaaggccccatactgtcttcacctgcaggaagccatgtagttgtgtttttcacatagacctgaacgactcctcactgggttaaaccacgctctttggttggttggtgttaaagtcttacaagctctcactgtctttgaagacgttaatgaatcatccattgttaatgcaaaatcagcttaggcacaaaagtgttttgtggaagtttctaaagttacaaaatcaaatttaccaaagacaaatgatcattttaaaaataacctggcagaatcgtcaatcggacagcacctgtctggaacagctgtttccctgtacctcctttcctgttcctacctcatcgggtggagggcctcagtaactggggccacaccttctcagtcactctcatttttgtatcctgttcctgcatgctgctcctcactgggttcggaggttgaattgccagtgtatggggaggctgtgccaggtgaggacccaagcagcaggaggagaagccaagatacagagggcataggatgacctagaacagtttagaatgatccaaaacttagtcagccttggggttccttggaagatgcaggaatctcaggcacacacaatgctaggaccagtaatcaaatcaccccaccagagaaggttcaagtgttagagtcggtagggctcagtgtagatggccagggtgccagacttgacagcaggtcttcacagaattcagagaggaagtcagtgggctggactttcaggatgtcccataggtagacagggtaggagggagtaccaggtggcagtgaggggaatacccctctctgctgggaagagcctcagatcaaggtgcaccgtacagctcaccctgcatctgatgacccctccactggacctcactcccactgttggctacccaggaaccactaggccacttgcctggtgatgtgtgggacgtctgcggggggttgggggggaggcattcccagttagatcctaggaggtacagctactctagaaggcctgggaaggcttaaccagcctcacactcctggcttctctgctctgtaagtgagcttcggggccggcagtgttgggactctaacaagagagtcatctttctgttattgtaactaacacccatgaccaatgtaccaagaaaatgcatcaactaagccaaaagacttcccatgacggggccagcctttacacatgggccttcaggggatattccagacagcaaagaatgtgccagactaggtctcaataaatgtatgttgatgccagatctgattcccacagcttcctgaatctagatgctctttggcctccatcatattactgcccactgaacccatcacatgccaggactaccatgtcaaaaatgagctcaggaccccaagtaacacatgttgaacttgcaatgtcatgagctgaagcactgtaagtcatcaatctgtgcttgtctttagttctccttaatccccaggaacaggggtctagaccaaagccataagtttaagagcactcttgttagccctagatgagacaacatggatcccaagacgtgtaggtgggggtccatgccctccctccctgcctgtcttccaggctactgacttgacgggaactctgtgggctggtgtaggagctataatttggctgtaggatatactgatgtcagggtctccagcccagccctcccctcttgccctctaggctctcttgtgtgtttgtcaacccattgggtatctgggctgtatccaggggttctgccttggcaccaaatttttcgccatgatttttgggggctgccgaagaaaaccagtccctgcctccccttcctggactgctggatacacccacctacctcaaagccatcgtcttttcacttcttctaaaagtcgcactcaccctcaaaagacagatgccctcctctcatgagatgggctagggttgcaccgagcagccatgtttgaggaggtgtcttgggttgggccctgagaagggaacagctgcaactgactttgtcccaggaacagttgggtagagggttcttcctctgacatcactcacatagcaacacaggttgggttgcacatgacaccttggccaccaggaagcatggtatcaaataaaaacttctgagaaggacccaagagttggctgaacatagacacgccatctacatagtgacaataagcagcaccagccatagcagctggtcttgatcactggccagtacttgcctggtagcgctcctgactgttctttctattgctacatcaacagcagacattgataatcatttttgacattcgtctcagcgcaaggctccaggcagccattaccaattgatctaagatgtcgtcttccagccccaggtctttcccaaagcagcaggctttatgaatgtgggtccagtgcgtggaaagaactaatcacgcagcccagacagagctgggctgggaccagggctgctcactgcaacagctttagtttgtcaggcacacctgtcccctctgtacctgcccctctcctaaatcatccagattgcaccctgagagcatgggctgggagcgggagtaaagaaggaataaagacaggaggtgagcaggggtgtgggaatggctgaagagggcactggcagacagggccaggaccgtgtgataccatcaaccagtgggactggctgctggccacggtggctggtcactgggaggactaaacccaccttggctgaagccctgtctctgcaggtagccgtcccccctcaccttatgtccccagcgctttggcttctgtgttcagactgtttctctttctctttctctctcctcttccttcggctgccctgcatctctgctgctgcagtctcccaaggtgagtctgttagtaggtgtacgccctctctcccgcacagatttccaccctctcgatcaggtgatggtgaattgcactcttagattttctttgggaaggacagtgcatggcattaacaggtccctagtgtctctaccatctttgggtactcatgccactctccttacttatattgctcctaggcccctagccatcactggattgttagcacccgagattgacaggtggcccactacatagaaagagacccagctggggctcctggccttcctccgtagaccaaggtaactggccgagtcacagtttagtccacccttcctgctatctcagctctgtaatctcatccaatcagatagcaacaattccctcacatcatcagtggtccaactctcccagggagggatgtggatacggctggggggaagcactagtcaatgcatatgagggcctgggtttcatctctgacaccgggaaacaaaaattgcagtattagcaatgatgttctgaagattcagtgtgctccagccctgttcctgtcccagctgtccagctggttgaacatatgtcagacagctgttcccttcttgggcagccaacctcatccttccctccctccctccctccctccctccctcctctcctcctttcttccctccctccctcctttcttccctccctccctccctctctccccccctccctcctatatagccttgcctgtaaacagtagatctttgctgttcactgtacaaataaggtcttcatagtgtaaacaaggtcctgtgtattctggtctggggccatgttggacactcctaaaggaagggagtgtcccctaaccgcctctcctccttccttacagggtacaaggatcaaggtatcccacagcagctgtgagcctacaggacctgccggagaagtccaaggtcctgtgagggctgcaccaggtggctttgggcacaacgaccttcacatgctcccttctgccctttctcagattggggtgaaagggagtatttcaaaaatattatttattttgaagaacacacctgcctttctcagcagggtcagaggccaacttctctcccagccccagaggagcatgggaggaacagggctaagacttgaggactgggctagaggtggggtattgaccaagcaccaggggtgctgggcaatgcttatccaactgcccactgaacaggcacccaggcctgtctggctgggttgccatgggctctgtgcaggtgatcaggcactgtcccaggcattaggacttcatggaacacttccgctgggtcctcacccctttgctcagccctgtggtcccctgcatctgctctgtggtcttccagggggcagtatcagggcagagattgcaaggtggccaggtggtagcccagcgtggaaggtccttaggtccccacaggtgtctgttgataccccagccttttagttaatggctgtgtgtgtgtgacctctgcttcccagaggccagggtggcaccggctcctcctctgggatgatattgctagaattccagatgcctgtgtgcaaaatgaccagactgagttgtaagtggctgcagaccagcagccttcttggatgtatttactactgtttctggtcccctctccttctgacgtccacgtgtttccggatccagatggtttggtttgaggaaggtgacggaatccattcattgctatgtcctaacacccgagctgagtctgggcttcccacccaccaccaagcatgtgaatatctctagagagtcctgtgaatagtcagataccttgggacccatgaaaggtaaataccctggcctgttcaggtttcctgagcaagtctcaggggacattggggacgtgtctgtatttgaagtgtgaaaagagtaacatcatgagactggggactgtattcaccctggaattcatacatgctgcagggagatgcattgggagactaaagttggcaccacttgcagacctttgtgccccttcagcagcaaacctaggagtgatgttccagtacagagctagatccttactagggggagaagccaacagaaggtttgcgggcaccagtctgaaatgaagagaaaagtgatccaaaattacagtgatggtgtggctatttgcatctctcttcgttctcctaacgtaggaagcgctaacatgtgggacaggccgagctcagttcccagccgcactggccttgagccatcagtgggtcccacttggagaatctctccctacatagcagagactctgtcacactgtggccagggcgaaagaaaggcgctgtccactttctgccttggtggatggaggcttttgggaagcacctcccatttccccggggttccagcccctaccaggcttcttaattgtagtctttgggagcagaccccaagactggacagctcctgacatcatgaagagatgtagacctgtgactactcactcttggctctgattctggactagttttcccgtcctactccgtgtctacccattagtttcttccggggactgtgtagattgagttgcagccttgaatacctgccagggtcctgtatcttcctgtgtctctttctgttgcttctgtgtgtccacagcccctgtcttagaccaccactctggcaaatcactgctctcaaggaagctacatcaggcaccaaagctgtatggatagccacgctgcaggggaacgatgggtcaatgtgccctctcatgctgccagcccacagcccttaccccgcatagccagtgatgacaggcgttggcaagagcagcccccagaagtgagagagaagtctacttgcctggtttggactgggggtggctactgggggagttgaacggagatagcaatttgtattgcttgtttagtgacgtgagccagactcgagtgggactttcctgagtgacaagtgtcaccatgagtgtgggatggtttaatacaggggtttgcaagcttgaaaagttgtctccctggcaccccccaccaccaactccaggtggctgatgtgggtagacttaggagctcccagaatagtgagtctgaaggttaccattagctacaaacagcagcccctgggtgaggcataactttagcataatcattgtcagacaatggacagcggctaattcactccacatagtccaagctggccattggatctaggtgaccagagttcatttactatacaccagctatcttgaaggcagggccatcgagccataaagtgcttagtggctatgcagccctttagtgacaagccagcctagatggcatagctcagggctactgtcctaaccttgggaaagagtttggaagaatactctctggttatgagcaccaggggcagaaatcacaggcacacaaacaacaccctagtgaatgagacactgccaggaacccatgtggcatcgtggtcagagtgaccatttttcctaccacagtgggaacctggagcaagaatgagacaccaggtaggttgagtgtcctagtctcatttctgtggctgtgataaaatacactgacaaaaaaagcaacatgccaggggaaaggggttcttgttattgttgtttttgttttcttttttgcttctaatccaggtgatatagttcatcgtagccaaggagtcatgatgcaggaactcgaagcagctggccatacacgcacaggcaacagcagacagaagcaaacgcagccacgctgtttgctctttttgcaccttagctagttttatgtaaacttacaaagtccgggaccatgaaatggtgccacccacattcagggtggattgttcaattaacaattaagataatcctccccagacatgcccagaggccgatctaatataaataattcatcattaagacatttctcaggtgattctaggttttgtcaagccaagactaagcagcagtgtgtagtgtatagtgaagaaagaacactgggatccctggactgtggccactatggtgtaatccacccccagcctcagactgaccaatctgctgtctttgcctggttcaagtctccagctgcaatgtggagacaaagaaggaaatagcaaggtctgctccctgcctccagggcccagacctgccccagcaatcagcctccacagtaatttggcccaggtgctgcccagagcagttcttagcccactgttctgtgagccaccagtgggcagaggcttagttaagctttctcacagtgagggaaagcagaggcatctccccctgacccacactcctcgggagtcccagggcgggataatgaatctcttctgaaggacagggcagtgtcccgcccctgcattcctggatccttgacctcatctgccctcaaagccatgccccctggcttctgcagaccccctgtgagggtgggagcagatggcagctggagaccgttggtgctgagagctgcctggttcatgggatccagttcctgcattccctcacaggaccaaggctgcactagtgaatgataaaatcatggggtgtagaatgccagggggctggggagcagagaggacaactaagttaaaggtcacacagaaaatgagccacatggctagcatgtcccccagacagaaaaggatcaagatgtgtaaaagagaaactcatctatacatctcaaacattgggtctaaggccagcatccagtggctggaaccccaagaccagaaaaatccccccaaaggtctaaggttcctaaaagggggaagtgcagctgaatgacagtggcccttttaccttaagaacacaaccatctttctctaagtcctctttagctgcactcttcccagctgggtggagggagaggaagggtgtgatgagggaaacttacacacctccaacttatgtgggtgggaataagccatctagtccttagtggtgtgcatcattgctgaagacctgcatgaggaaagcttgggtcatgtatagccagctggagacccagatagctctctgttagtggtaatggctctgggcaggtctttctcatactttctgggtcatattctcgctccattatagggatcagagaggagctttgggaagcccccacccttactagtcatggcttcccagaggctgactggcctcctctgtagtttgggagactctgggcttagagaacaagctatagccactccatcacttactccagggcagaagtgcgccccagtacagaccaaggtttccccctagtggaagtgggaagccaggacatcctctgtgggcttgggggtggggcctactggctcagccatggggctctacagttagtaaatgttccttcagagctaaaaatgctcaggtcctgagctcagatgaaagattcccttcaccccacacccctgcagtgcccagcttccatcagcaaggtgggggagacccctgctaatgtgcactggtcctgagctcagataaaagatgcccttcactccacaccccctgcagacccagcttccttcagtgacagcaaggtcaaggaccaggtgctctatatccttccggagagctctgtgcctaggttgtaggggacatagaggtcatcttgggcagtggcagtgaccatgtggtgaagagccagctgagtggtgagggaagggctcagagcctacagtcttcctgttcctgttagcttttgagatcttctgaatgtgactgggttcacagaggctgggtgtgattccactcagagcatgacccccgagtaccctcctgggtacatcctggggtgactatggtctaacttcacccatgtccctccagctgccttgctatctacagtataggaataaaactagtccttcacttcccccaatcctgccagagtaaagggtttagagaactcaggccacccaggggaggcatgttgacctcagtactcacaaaagctggcagccccagagctgggagagtccagattcttcccagcaaaacaaacactggtctggcatgtcacaaacccccagggggagtgacctttcctggggagacacagagaagtgctgctttgcccagataggtcaccaaaggtctaaagaaatgatcccaccaaggttaagtctgggacccagtgagtatatggggttacttaccagaacatggtgactcttggtaagctatgtcacagtaaagtcccaccccagcatgggtgacaactcaggaaagctgtatcactgctgtcctcaccccagtcagtcacccctccccaactcatcccaaagcacaccagttgccctctctcctggggtctgtgggctcagtatccccattgcactgaagtccccccagagtggtccgatgtgggaagagcgtggagcggccatgacctcttcctggggctttcctgggacctcagatgggacttttctacactgcctgccccagcccaggaaccagcaagcagttgatgaggagggaggtttgagcagagagaaatgattggggcttgtgacaaacttctgggggcttctgtggagctgtggctggccttcctcacagcacagttggacactgttacactggctgctcctgttttcagcaacccataaaagaccctggctgtatcacttaattatggacaagtgttgtgttgtgaattgctgttttggtgttgctgttggattcgtttgggtctctttctctgttaaattaactgttgtatatttttcatgttctctgaggatgcccagggctttctcttctcactcctactcacagggagcccacatgcccaagtccagccaggtgggcattgccagcccattccaaagactggagactacttggaatatctcagccctagggaagattctagacttgcctggctaaaactgggacccaggtctgactttggctaatttttcccagtgtccccaggcttgattaccccccccgccccccgcccccccgcccccgcccccccaaccttggcccagggtcagcagggccccccaggagcagagcagggctcctgcttctccagttttccgccagctttgaaccgttccttccagcagcgctgctgtgtatgtgatggagaaccacccacagcaacaaagcccatgtacatatctccatatacatatgtgtacatatacacgagatcttgttataaatacacaaagcatggcatttctctgtcactctgatctgtgtgtgtgttttaaatgcctgggaatacggttttggaacccttttcttcttttttcctcttttctatgtaataaacattcatgtgacctctctggtggcctctcgaattcccatgtcttccatttctgtaaccagacagatctccaaccgctcccaacgcttccacccctctctccctacaacctcagctgccgatctgtctattccgaaggccacctttccctctcctgggggactgatccaaagtttcctctgctccccgagtcccttggagccagggatgtgtcctctccacacagcactgggaccccagtggtgcgcagtgggagcccacgtccattcttgacggcaggactggccggcgagggaaatgtgtgcgtgagatacaagtggagacgatgtcttctgtaaatgagcatctgggcatgcgcagtttgaacttaatgctggctgccggccatcgtcccctccttctgagagaaggcagagtgccatctacagcccagccaatatcttctttggctgatgcatgaaaacctagggaacgtattacacttactgatgaagggaaataaatacattacagatgaacataggagaatgtaaaaggtgttctagaatctgacaaaacagacttcaaactaaagcaacaatctgtcagcaggacattatggttctcaatgtatctgccctgaatacaggtgcacaaatctcataaaatgtgctattaaatgaaaggccacagattaaccttagtgtgaaaatacctggtgacttcaataccacactctcaccaataagtcatccccccaaaaaaaaccccagaaatatcaaaatgaaatgacactgaatatcaaatggacttccagaacattccatttaaatactgcagagtacacactcttctcaacagcccacggaacatcctcctatgtagggcacaaagccactctcaacaaatacaagaaaaattaaaataatttctctatcctgactgatcacaataagactacaaatcaacagcaagagaaactccagaacacatacagattccagaagaatctagaaagttctggacaggcaagaaacaaaaaatctactaaaatggaacccatttgggttatggaaagatcagtgcttgggtgataattagcctctggtttcctgctcctgtgggagggcatctcagggtttatgagcgcccaggggggggctgacaaaatacatcatctactgtgttgcttcaggagcagcaggctggaggactgagagagacatgcctgccggttactgtcagtggtggggtggtcagggacaacgctgggcccagaagacccttgagagtcctagtgttcactcttctccagtgtctgcagggctcagctgggccttgggtacctcctgggttaaacctagcaatgcaaacattagtttgagactgtgttccttctagggacttagatactatgagctagtgccttctttgctctcactgagtttgatctccccccaaagggtccctgatctggagagaacaatgggaggaggcctgtgctcagcagaggccctcagctgcttcctaggcaggggtgggtgtgtacattctcatcagatatagcaatgcctggaagcaaaactgctgtatggcaaagaaacttctacattatggaggaaggaagtttcatttgggagccatcctgggcttccaagtctccaggccagcaggggagtctggaagccaggggacagaggagccacgtctgctgttggcttctagagaagctgggtacatatccaaagtcttttggcaaagcagaggcagagacagaagggtctcctccaacatgacagtgccccacaatctgcacctgctgctccctgaatagacaggctctcctccctgttgacacccaagtccttcttggctacccttagcctgggagtcacattcaccagtgtgacacacgctggcctttgctctgtcagggggcaaactcctgctttactcacacccatgcgatgctgggaagactgtcaaccccagaagccacccacttccgagcaagagcaggtcatgcaagcccctccttctgcacttatctgggtagcctagggtctttcaccggtctctctacctgaacaagtttcctgccttggtccttaggctgaagtttataagcctgaagccacttgtggctaaagttcctactccttggagcaagatgccagcatgcaaaacaggcagaaagaagagggatgttgttccatccctcaggctgaggccagtgctagctctgtttagtctgcggtcagccattagagccatgtgccccccccccagcctttcctttattagttctgcctttcctctgttgcttctttctttcttcatttccccctttccctttcctcttttttctttcccataagcttattcaagttctttctctccagtgcgtgcttgtgtgtgtgtgtgtgtgtgtgtacgtgcctgtgtaacatcctcctttggctcagtgcctttcctattcctcttcttgcctaagaacaagggttttaatgtgtgcctgactcagatgaggtatgatactggaacaaatagctgaggttaatcaacttataacgaagaaatgtttatttaggttcattgttccagatgtttcagtccatggtcaattagccacattgcttttgagcctatggtgagcagcttgtcatggtggaagtgtatgacagagggagctgctcacctcatggcaggagtaagagagacagaaagaagggacaggtctcggtatcctctcagagtcataccccccaccccaatgaacagacttcctcacattaggctccgccccctaaaggttccatcatctaccctctagtagaactacagaccagggaccaaccttcaacacatgatccttggagggcacattcaagatccaaagaatagcaccgagtcttaatgtgtatgacacacacacacgcacacgcacacgcacacgcacacgcacacgcacgcactgtgacactgtgacactgtgacactgtgttgtttccatcaacctgatggctgtggagagccctgtttgtgggtcaccacaccctgtgatgtactatggtgatacaatattacaaaactatctctcacattctaagatattggaacttcttctgggcctcatggctgtgagctgaggttatgtattcttcttcatgcccctatgttatggtaataaatgctggaaacaggaaataggctgaaagcaaccttacaaaataaacatttgctgcaagtggtaaaagcaaaatacaaatattgtttgataatatggatgtttgttttctaggccagatggagtgagttgggagtcagtgaaattttacctcttgtgcaactctgttgaaggcttccgtaaagtatttctcattccttccccatgtgatgccttttgtactttccaataaatacagaagaaaagcactttgttagggacacacagatgcagggacagattcctaaaacaacattcaggcaggcacacaccagactcattcaaaagctagggaacagtggaagacacgggcaaagagaaactaagaattcaaatctgggctcgcttgggtaaattactccaagggatagtgctcctgatttcttttccttagtgtgacatcaatgcattattggcgattctgagtttactactgccgtgttcaaaccagcacagtgcatgctcttagcaccagagaggcatctgaggtgcaccgcgagccactgactggggcgatgaactggaacccgagttgcttcaactttgtctaagcctttgccttttgggcccttaggaaacgagtgcagaggccagcagctgggcctcgcgtgttccctacgaccctagtctttcagccagtgtcctgccagccattcccacggtgttctccacaaagcagagcctgaggtgcatgtaggagagactgcagccagcctaaccaagccgcaggtgcccaggccagcctgcatgcgcatgcgtggcaggcacttcctccaagcccagctggcctcaatgcggaagagacacctgaccaaagacaccaatgagaaaaggacaatgcagtggagtcagctccctgagccaataggaccttgggaggaggtataaaggcagctctaacttccttgataaacgagtctgcagccgctctgctactcactgactcccagtgcctgagtggttggtgctgcgtcttcccaccccctcccgcaaggggtgtaggagcagggtaacccgcaacatcactttatagagagggctgggtgtctcagacacaaacaatccacggaaatagcactgacttctgaacatgtttatttttcttccaccagccacatccctgagccaggtaaacttaactgctgggtggaattcaaagtgcctggctgctcactgacatgaagcacacttgtatatttacaaatgtcgccgctcccatctcctcccccaaatgcaaagccttttattcaaagaatcctctgcatctaatgtagaagcggaatttgttttccctgccttgctgcctctttgaagtgttagccgcttagccgtgcaattaaccaccagcctgcagtagaggctcgaagaatctcatttgaacccgaaagaagctgggcaagaagagaacaaacacttggaagacgatgaaaagccaagccccaaaaaagggtggcagggctttctggctcgacagtatcgagagtggctgattgggcaagcttggctctctccatgctgtgggccccagaggcactgttcaacaccgcgagggcatccaccctgcttgttgatttccttctagcttgtggccttgacctcataatgggccctggcatctctccactggcttagcattcattcctgccgcgcttaggagtctccagtgacacctgtttgtcactgggagaaacgccccacccgcccatttctcttcctccagcctttccctaggcctgagatctggctgtgcccacattgctggctccacagggatcctcggctctggccactggaagccactccacatcccgtgcccttctgtgcgtctctgaggcagtgtgtcctgcttcctccatccttcaaccctctggataattcccactcagcttctaaagtcgttttggtggtacttcctttgcaaagcctttctcaagtttccttcatgcccctgtcttaggtcaggcctcctctttcccctatgggaccccgggttttctctgctctttacactgtaccacagtgtccactgcctccactgtgccttaaacctgggcgctgttattattattattattattattattattattgttgttgtttttagagacagggtttctctgtgtagctttggggcctatcctggcactcctctggagaccaggctggcctcgaactcacagaggtccacctgcctctgcctcccgagtgctgggattaaaggcatgcaccaccaatgcctggctgggcgctgttatttaccagagcaggctataatttgtaaattaaatgcatgccttggccagcctccttgtcctaggcggtcttgcaatgcactttgatgtccacgaggggacaggctccctcccttgtggggccttgctgtttctcagctgtcttgaattcactccagcatgaattctcagaaagaagcatgactaaaatggggattttttttttctcattgaaatagagcagggctgctgctgttggggctgtcacagatcctgtttgtccataatatgcagaaactatttttaaaatgacacgtgctaccacactgaaatgcagagatgttcacggggggggggggacattctcccctgcccctactttaaatcccactttgctcattcacaagtttgggaagaaagaccaggacaaataaggatgctggttgtcaaggagtccctccacctttgtgacctgagctctgtgacctctaaatgtccactctagcaggagttctcagcaccatgtgttcagagtaaggggaccacagggtagagatttttctcttgtgtacttttttattgggggtctatcatgggttgtgactgtcacctagggcatcttctggctttacaaaccctccctcccagcctccccacatctctgcaaggtgcagaaacgcctcttctctgagctctgtctgcttccaagtctcacttctctgttgaatgtgtcatctctggccccgtgctcggtttgccaaatgccaggagctgggccacagctgtcacagtgaaaaacgaaattgaaaaaaaaaatgacatgcacgctgtttcttggcgttcttgggaactggatgtgttttctgaatttctgtggaagggtgtgtggagccagcctgtgaatggcaagcggacttggttctgcaccctcagtctgcagggaaaggacactggatgtcatggatgcaaactaatattgagcttcttggagggtcactccaagcctagaacaaacagcccgtcactgtagcagtcccaggtccccagtcctatttccaggcctgcagagcccatcaggtgccttgaccctgcctggactttggtatctctgtcccatataccccaggcttcagcttcgtggctgtcttagcagtcctgtggcaaagtcaggtaccaggacacagtccccggactggccaggggtgcagacatgcagaatccaggcaggtttccagactggtccaatgccagggtctgttgttttctagccatgtggtcttgtctgtgcttctactctctcatgtagaacacgggctgacaaggttcacctcaccaggtattaaaacacgtcgttttcgatcacctgacactgagcaattcataacctcgggccacagctactttcaagcaggatttggcagccgttctaaggagctggagaataaaccatttcagttctgcagtccatacagggggcggggtacttgtctcatctgtggctgtggtgcagaagaggtcctagatgctacaaaaagcagtgacctggttgtttctaataaaactttatttataaagtctactttctaagaggatgtctgctctggtggctgcatagtggaggggtgggcaaggggggcagagaattcagtcagccatgcagtgtggggaggaaggaggcagatgttcctgtataggattcagaagggcttcagtcagggtcagacaccacctcaggatttctgggaccaaatatcctgtgttcctcacactacacaacattgccatatgtgagcatatgggccctcggctaggctgagccccatcgcacatcagtgaagatggggcaaccaaggggcctgcacagacgtggaggagaagtgtctgggctgataaagttggcagatactgagatgtatgcagtctccaggcttctcctgtataatcagagattcagagcagccctctggctccttcctgtcacccagaactctccaggctgcttcctggatagcctttggagatccctcattgccagcatccttctccctctaagactgagggttcggtgacagtcccaccaccccgggtccctgcccagtggaaggggcagggagaagactagccagagggtgtggccatggagcacactgcacccagggatttgatagctggtggagatattcccaggagtggctaagcagtcacagtcctgtgctgacacacatggctgggccattgcagattccttaggggcagatgcagcagaatctgagctgaatacagattcctaccctgcctccctaaggtgttctgttcccagtcaggcagaacttccaccccccctgaataagtctcatgacatgacgttggtcttaactgttgccccatataccagcagggaccagtttcttgagagcccaactgagatacctggtgccgaaagtggtcgggagatgcaacaggcaaaggccacccacttccttgtttgcttccaggtctgctacaaagacttcaggtgaaggtgatgaggactctgtggttgggtgagcatggtgtcctgtgggtggtctagaggacatgtggcaggtgaggtactggggcccatgtgacaaggagcaatggcatgcctgaggacagggatgtaagtccagtcagatggttcaggacagcatgcaaagaacatggatggttcagggccactcagccaacctaagttgctactgagggttctccagggaacatcaccttctccagggcctagggttctggccatgaccacaggccccctggggctagccaggagggcaccgatttgacatcctggcagatggctcaaaggcttctcccaggggcttgattttcctttagcaagtgctgtggagctgtgggttgactttgcttggaagggtctgcagcctcacacaacagtggctaacatcagtcttctgggtccaactgtcctttggtggctgtggcttatggcagagctggagagaagctgtgaagggctctgacagggttttgctgtcaagggtttccctgagacacagtcacggttcctaaatgagcactattgggtctgcagcccagtgctctgcttccaacactcctccagtaaggggggcaagttctgggttcaaatctttcctccctaccccttacccagcccaaattgtttggctttctaagcctcagtttccctatctgatcagtggagactatacagtcttgttattacgggtgacatactgtgagtgatggaatgtacctagcacagagcccaccatgggcaggagaatcatctttgtcactggctgacatactcaagccactgttgaaaggtgtagagtatgtagaagagactctttagaatgtttcacattgtttgcggggtattgttaccccatcttacaaccactgcaggccatcacagctcttctgtggtagttggagcgtgggggggggcagaaggatcacaccacaccactactggtctccaaggcctttattgggaaggggagaatgtctacatcaaatgatgggcactgtgcaagggatgtaacagtcccaaggggagaggaatacagaggaggagagccagccagggtgcggtaagggtcctctcctccccagaaggcactgatgggtgagcaccctggagcagggggtggggcctatacacacagggttagcagaacacaggcagtctcaaagctaaatacaaccagcctaggtgaacagctccttgaggccacagctgctcagggctcctccggacaagaaggaaaggcccccagaaggcaggcagagcttgggaggagcagcccaacctttcctcttagtgttttgtgcaatttaaacaacaacaaaataaatataacttacacacttcttaaagggcactaaagtctagtctggggaaagcggctgcagcaaccttcggaggagtgtgcaaagcagggctgaccaccaagaaatctggtggcccaagggcaggagggctccgtggaccctcacctgcacattggtgcacgtagcctgccccatgtcccatagccaggaccttgggcgtctccaccatgactgtgaacatggtgtatcagacggccagaggttctgggaaattccatctgagctctatccatcccagtggggcagggaggagaggctctggcaggatggaagggggagaatggctcgggggacacagtgtgggtgctaacatggtaaatacaaaaaacccaatgaagcgaaacacccttagtaacagaataaccctagagagatgcctctccacaccactttacaaaacatcccagtgcaaagcactgtccagcactgtcctaagctcttgctgacaggtgtcacagcacctgagcacatttctgtgatattaaagtgcttggtgagttatgttctcttacatacattgaactggtccctggcaattttgttcatagcatagtttgctttagaagacatttttgctgagatagcagtggaggagtttgggccagatcatcgctacactcttggaattcatgatgccccttcccagggtacagctgatgtacagaccacagggtcctctcaagccctccagcaactacagctggacagtcccagagcttgctgcccggttgctactgcctcccccacttcaggctgcctctctccccaatcacgtgctgtcacaaggtctgggctcactgatgggggtgcagggtggggggggtgtggcgtgacctttagaaagtcagcccacacaggagcctcaccaccatctgaacaggagccaggaagtttaaatgagttccttttttaaaatctgtacttatacatcctctcgggtcccacctcccgcccccaccaactgtcactcacccaccagcatgaaaggggaaacacatatgtcacatgggccaacagttcttctagaaactccagggagctagggtaggcggccaagacggccacccctgcccaaagctatctttctaggtgtggacacggtggtctaccccatttcccttggtcttcccaagctgtgtctgctggcctggcacccagaagagcatctgtacatgtgacccagagtatctcagtaatagaggaggtgacaagtccagaggatagctccaaatggcaacaaagctgggagttgtcttttagctgtcacacaaatcatatactcttttcagtcagacaggtcactggcctcacagttgaggtggtgattaacaatggtcccccacggcccttcaagcagctcagggcttcaggaaggaggaggctcgggacagtcctgggtacccctatgagctctgggaactacccacacgacagtgagaaacatgggtataagcccttcaagtggaagagcaagagacttcaagggaaatttataaattattccaggaagctcaaatcttgcttccctaaggcctggtacagcccgaattgttaaaggttcccctatggagggactccaggtatggaggcaggggttcctggctaccaacgatttgaagggacaagacagtagtctcctctcctcggtatggcaggctctcagagctgctgcagatccctggaagttggtatggaccttgagtattctacccagctctggaccgttccatagcagggcagatctagggctctaggatgtagcatcatccctggacgcttagctttgcagaatgacccctctgaattcatgggcagtggtcccagatagaagagcaaagttctttagaaacagtcaagctgctccccatactcctggctcctagcctggcctgaatcctaagtgtttaataccagcgaggtggggcctgatttagcatctctagaaagggcacacagtgctcctggaagctgggccctctcactggagaattctttactcataagccacatgcagattcctcagaggctgtgttcccaactcccagaaatcaggaccctggcctggcttcagagcccatggtgggaggctccaatggggcattgtatactgatggcaccagccaccagggggcagcaggtctccacgggtagccagtctgggcctgaactttctggggggtctttcagagggaggctcaatttctcaagaccctcgtgagatcccagggcctcttgggcccaggccagccctaagtgcaactgactgtgcgggatgcagggcatagctttgggtaattctcttccagaaggcagttctatttagagaaaattagaaacgccacctccaggcccttgtgtaggcaggaaagagacttagaaaatgtcttttcttctcctaagtgtcctgtagtgcagatgggaggctctgttctaggtgggcgctcagagaggaatgaagaagagttaggggaagccagggagtgggagaggcagaggtggcaggcaaggtggcggtggcctcaggtgagtgggctgccctgggacatttctgtcaggatgtcgatgaggttgttcagccccgagaggtagccatcctcccggttcccctcctgccaggggacgtcgtgttgtagggtctggccttccggtaggggtgtagttttcccgaagtcaatcatccacaccttggcttgctccttcttgtcatggatgaaaaggagtgagctgccaatgacctggagggaagtgggcctatgaggaagggggcaggaagcagggccaggcccaggccggggcagggctgggaggaggggaggtaaatggacacaacaggcccaggaggagggagaggggcagagcctggagattagggctaggagacacagctaggtacttaggtattggagaggctacgaaaagccaggggctacatgatcctgagggaggcttgggtcagcaatttcacttccgactggaactggaggtgatggtgaggggtgtcagtcaagcaggcggggcatgcctgtcagtctgaaggctcagtaccctacctcatgacacttgaagaagggagagatttccagagtttctcgaatggccttcagccggtcccggtaggcgatctgaggacagagatggtcagggtttcacatactttgtctgtgtgcaggggtggggtcatggtatcagatccatgtagttcatctgagtcaccgaattataagcagcagagaccttggactcatcacttactccaacctcacttaccccagctgagctcagagttatacctttcccagaggcctatgtgtcccctcaacctcctccatgagggggcagactctcccagcatgccaaccatcaaagtcagagcccagaactggttgccatggtaacttcttgaccataaagtgctgtgtccctaactaaagacagggtaaggggaaaaccacagtatctctacatgagtcccctctacagagccttacagatcttcctgtgttagcaacggggtatctgattattcccaaggactagctctgggagtctcatcacccatgagtatggggtcatcagggaagcccatattacagggttcccgtagtgacacagggtccctagcaacagcgatcaacccttcttagaaatgcagttggtggcatgactcttgagggtctgaaatgatccagacaggctcccaggcaccagaggactagtactgcggacctgctgtgtgcattccagccttacaggtctgggcctgcttaggtgtaacccctagctctgtctttctctatgtgtgttcttgacctttcaagtctccttgtctgtcaaatggagatgagaatgtctgcttgcttgtcctcacctcaggacaagggggatgtgatgaacactcactatagcactcggccagcggcagtactctatacagaactcctgccagggaagggcagtgtgctgggacagagtgactgacagctcaggagatgagccagtgttcccaagcttctctgagaacccatggattctgggggcagccaggtcaccttcacacagaagtctggggctacagtttcatcatcaatcctgacttagctaggttggagaagggatggtcccctgaccccaaaccctgactcaccaggatgttctggtttcctttagtgaattctctgaaggcctcagtgacctgttccctcgttttggtcttcttgaagtcacggttcacagagccatcttccttctgcagagggaggcacccagaggagtcagcagagggcccatgggatggactgctcacgatcatgaccctcacgctgctctgtggaggtggtcaggtgcccagggatggtgcaggaaggcaggtacaacaaggccattgtcacctggtgcaggagaacctgtcctgggccccaacagaggaattcacagagtggccctagacccctggccacacactgctttaggaagtcctggtggtgtgagggtgtctgagacagcaatgtgtgttagcagccatctggatgatcaggctaactatcaccctatcataggcttgtgttcaagtgaccctcattttatagtgacccaaagcatgagagccacaatgctggtacttagttttttttttttttttttttttttttttttccccaagatttatttgtttattaggtatacagagttctgcctgcattatgcctgaataccagaagagggcaccacatctcattatagatggttgtgagccaccatgtggtttctgggaattgaactcaggacctctagaagtgttcttaacctttgagccacttctccagccccaatgctggcaatttttatgatttggcaaacagaagcgataaagtgtctctaagggaaaaggtataaaagaagtgtgtgtgtgtgtgcgtgtgtgtgtgcatatgtcatacattctcatacatgtatgtgcacaatttcatattggttctctagattccagacatttggtttgggtcttgtaatgcgctgcaggggatactatgcagatcccccaagtctgtggtgtaagcctgtgtctctcatccactccctcatccaccatctccatgttctgagctcagtactcctgttcaggctgtcctgggcaagcacacagagctctgttctcttgagacactcgggttggaagggtgggtccggcaggaaccctggcccttgcacctgtccacctccagtctgaaacaggtgacagctataacttcaggaaggcttgctgcagggaaacagcaagcagctgggtcggagggagcagtgaatgggagccttccttgtagggcctccctgctaactgggacaaggaagggcaaatggtggtgcatgcagttagcctccctcggccggtggatgctgtcggctatacgaaactgcggccaggagcacatcttgcctgggtgaacggtgccagggcatgctgttcagacagaccacaaatggagaggacgtgtatatataaattgcatccagtctgagagctggatacttccaagaaagaaggttgctttcagaagagaaggaaggacaaatgattttctcactccctaagctctagaagccagtgagaccctggtgatctcaggaacgcacatctccacattatatgagagaaggctacagcagcaagctacccaactctgactccatactggagaggggccaggcagaccttgcctggggagaaaaagggaggaccagggcccttggagggacagtcaagtcacctgccctgaaagcatggccacctgagacatggggagcctgtattccctctccctgcttctagctaggtcttgcatgtctagtagttagggacatggaatgggatacgagctccttttcagggcacccaagaggaagggatggacgatgaggtttccaaggccatcccaggtagccacacacctctccttactggcagtgagcccacacctttcctgtggcaggcatccaagctggcgcctatgtggggtcctctgtacagccctacaaataagccacctccacttcaaggtctgccacctgcatcttcagctgcagaatgggcaaacacctctgaggctggctgtccatacttaggcctgtagaggtgagacttacagactccagcatcccaagtccctggtcaccactgacaatcatgatcctcagcatcctcaggccacacctcacaggtctcaccttaatgccctcgatcctgaagcccagggtagctgtggaactgatggtttctcgccactgcatgtaacgtggcttggtcacagctcgctgagctttctcctcctcagtcggggcctcggggtctacttcaaccatcttctgatacatgtccttccgcaagctaggcttcttccgggccttggtgagttcttcctccaggtatgtcctgcatgggagatgaagggcatgagtcctagggctgggttacagctccctggtgaatgaagaccctgagctggctgtgcctggttccaggacaatggttaacatagcaacatctaagatgaggcatattcaatgggagatccatgcactgtttgagctcatttgagagacagagcatccccagtgctcccagagcaccttgatgctggcactgtgaaggcctgataaacttaggagccccctctaagggactttttctagggtcagcagaaggcaggtgtaaggacagtgctcaatgtgtggaaaagagacagaaggtgggttcctcttggaactctgatgtgccctggcaacctggagagcatattctgtccttccaacctttctccctgtccccttcagcctgcggctgggtggcatctctggctttttgcagcagagttcatcaaagcacaaagggcagcataagtgggatctgagtgacctgtgctggagagggatccgagtgacctgtgctgcagtgggatccgagtgacctatgctggagagggctgctcagggctccatagcccagttgtgtctcagagataaaactgatcccaggaagactaagagaatatgaattgccttatgtgcttccctttgctgtaagaggagtctgcaggctaaatgggtaaggacactaagctcctgggggacgtgacaggcagagacaggccaggctcagagctgtctggagtggagtcctcagttcagaactcgaggacccatccagatcttagcactaccctcacaaactctcaccatcacctccaactagaaagatgactcactccagccctctcccctgcaacagccttcccagctgtgtgcacgctgcccgggccctcatgaggcagcgcggtcagcagtcagctgcaggatggggaagtgggccccttgcgccctgcgtgggtgtgagctgcctcagaggcaccctcccttccccctgaccactcttctttcctgccccccaggcactgtcccaatgtgcctctccacattttcccagaatgccagtctgggtttcagaacagacggaaatgatttcagaaacccctgcacccattagtatttacacagaaagagagaactcccaattccctgggatgtgcgtgtgtaaacgggtcctggtttctgggaagactgtaaggggagtgcattagctcaggttgggttcttgcatgcatatacatcccatgtgccatggacactcacactcatacacgctcatgcacacagcacactaccgtgtaggcagacaccgagttatcagtggacctgtgtaccgtggggaaggaactcatgcctaaaacccctgagagtgcaatgcaggcctgcagggcaggcaggagccacacttgtgccaagagttctcagcatctccttaaacatggacctttcttcaaaggggcccccacagctccatttgacaggcagagtcaaatgctcctcaggcatggacaggggcttggaagggatgttcccaacagctactagctgggtaaaaggtctattagaggaaccattggtccctctcactgcctgctgcagaggcaatgcctgagcatggagagcagagacctgctcatcaacttctggagcccagagaacagatccacagagacctgttccctgatggccagaatctgggaaagaggctgactcaagataaagaaagggaggtggccagaccatgggagaccaacagatgtcagggacaaggcgagaacagcttctccagggcccaggggctggacccagcccagtcctaggtcagaatgacaaagattcaaccacagtgactgggttgcctatgagcagtgtgagcaccctctaacttggagccaggtccctagaaacaccctggtttaagatgcctccagggtccacacgacttcctcagtacccccagctataatccaccatgactaagcctggctctgctgacaggccttcccactattttgtaagcctctgcctcatgccctgaaacctagtgtttgacgaggacctgtgtcctagcctctttctgaagcaaggacaggccatgctctgttgacaaccacagactgcttatctgagtgcatgcacagagggctatgtttctgagctactgcattttggagaggactagcctgccgctccagggagccctgtggaaactggactgctggcatatccatggaagacagagcacagttggagtcctggtgtgcagtccatagacctgggcacatctgtgctgccgctatcaggaagggatccctggcgatccctgatcaaatgatagcatggcctaccctcccagtgtggctggctgtgggacacactaggacagtgtggctgaggtatttagtactgtgctcagagcacagaaggctcttagggtctgtgtgtgggaaaggtagagctggggtgagtgatgtttctggagagtcctggcccattccttagccccatgcaggatggggttaactgagcccctttgggtggaagagctctgaggtacaaagagagagaggctactgggctaggagacaaagaaagcttgggggtatgggtaccctgtccctgcagttccccagggagcagtcagccacacaagtcaggaggtccaggcagggctgactttcaggtgtagttgtacatgtctaggcacctggaggactgccttgtgggactgcgcatgtgcctacctccctctcctgtaggcagactgagccctggtcttcccacgttggaaggaaggtcagggcctctgtttgagtggacatattccagtgcattgtggaaagaagtttctggagacaggaataaaacagccagagagctgaggctgtgtggtggcttcaaggacattctgctttctccctcacctgccctagctccctgtgggccaagacaccggggggctttggaatgcaggaggtagctagtgataggaagaactaacagcagggcttggatttctccatgaccccatccctacactagagacaaaggaaagggatatgtcttggtcagctggcaggggctgatcttaggacagaactccaggaggaatgagaagaaaggagttgtgattgccttaatcagagcgcaccgagctctcccttcttccttctcggtatcttcgtgtaagaaacaacatctggtgggctggggaggtagatcagagggtaaagtgcttgccacacaagcccgaggacctgggttcgatccctagaacccacataaaaggtaaggcattggggcatgcacttatcccagtgctcggcagatggaggggggggggaagcccacctgatcagagaggtcttagaaaagaggctggccagttcctgaggaacaagacccagggctgacctctagcctccacaggcacatgtgtagaccaaagcacacgcatacgcagccaccccagatcagatgaactattcaaatcagatacgggcttcagctctgaactcagtccactgtccagcatgggtatctgcagccaaaatcaggctctctggggtggacatgcagtactggaaacctcagaggctggcagcctggaggcagggaggagggctttatggccctccaggctctggagctctctgcaaggtgtggagtcacttcaggcccacctgccacctgccacaggggcctctgcagctcccagactccatctatagttgcaccctagtggcaggtccttttgcttcttcttttttgaaaccagcatgtattacacacttgctctgtggtctctctctccgttcctgtctccactgaggctcactgaccaggagatcattgcttgcttcctccctgctgggcactcaccttcaggagcagccctccccccaactagtgtgcagctcttctgcctggtccccaagaggctcagcaccccgccagggcccctgccttgtcttctctagatcacagggcagagccagcaccccgtgtcctcggcatagccaggcatgatcgggaggagcatacgcagtaaggagtagggctcacctgatgcccatcttgcaatccatcacgcagggtgaatcgaagtcagccagcaggtcatccatctggttgtagcgttccccgtccttcaccacgtccccatggtaggctggcacgaagggtctcaacacatcaaccatgagccggtccaagcatcgctgctcagactcacagtgcttctttaggatgcggccattggcagctgccttgaagctccctgcagagtaaggaggaggagggggtctctagccgcagcggaagccaggggtatctgggacccctccccaccctcacccctgtctcttccaacaaccccttggaagctgcatcagaaccgtccccctcctgctgcaagacacaaccctggccaagctgagggctgaaggtgtggccatttatagacaagtaacttaaggcaaatggctacaaatcctggtcacccattcactgactgcaaccctggctgctcttctctgcctcctctgactccaagctcctcacaaccaaagttatcaacaggacagtgcagagttctacccactcctcagtattactatgagcaactcaccccgatcccagccctacttcttaaccaagcaggtgcccctgagtcttaggagaagaatctcagtgcctagagaggggacagagtgggcacgggccttctggtcagtgtcccttcagagccacaccctcaaggagtattaacaaagggtgttcatctatatcttggtctaagcctgtgttggcctgaaaagaacctgcaggcccatgaaatcatgagggtcaagtccatgggtgcctatgaggtttccccagaggacaaaaaaacatgttaaagggcaccatatggggccaagctgactgccagcactttggtgtctacggggtgacttggctgcatctcccaccaattctcccatggcctcttagccgtgcccaggccattgcagagtccttccaggtgaggctgtatctccactggcactgtagcccctagaacacggtgatgcaggcttacaccgtggctgctcactgagaggtttagctttgcctctctgtccaggattgcaaagggtaaacaagttacaaagaactgatctggaactgtgttagtgagtgaaactagatggagttgggaaacaaagcgaagaattaggacaggataggtgggatggatatactcttggggcagagtggcaagatctttggaaagatcaactgtctgcaggcacttagaaggcaacgcaaaggccacaccttctgccagggtctgttctagggctgccgcctcctggagcaccaggcaccagcctcccctccctcagcctccaccacctccctaggagagccgcgtccactacctgcatgtcctgccagctggatccaggggtacttcttcttgaaggacatgacaaagggggaccactgcaccatgttctttatcttcctccatgacttgctctggaaaagccacaagcagagtgctctgagtgacagacacaaccactgtgttctgatcagaagggatttaaagcgaggtaactcaatgcccagggccacatacctcaggtgcccataggtgagttccaaacaccttgttggctacgtagcaggcacaagtagctttgccacagtttacaaacagactgaacaaggagctcaagggatttcttaggggatgttcagaagtaggtgaaggaggcaagcaaagctcttccagtccagggctctttaacccagactcttcctcagagggggacaattaaactcatattgctcctttcatgtgcccactgccccagaaccttggcttcttcatctgtccagtgaggggcagacagctggtccatcaggttcttgggactcatgggtactagggctctgggaaatgaccttcttgtaccaaaagcagtgctctcagaacagaggggtccctgtcactcagcagcaaggtgttgctgtgtatcttatctgtagatgctatggtgaagagcattaatgaagaagcactccccggaggggctgttcataggtgactgccgagtaccaggtgaggtggtgggcatctgatgacccatcagttcaggaggctgagttaggaggggtcacacagcccaaaagctccagtctagactagatgacaagatgagactcccccatctcaatgagtgtgcgcatacgcgcgcgcgacacacacacacacacacacacacacacacacacacacacacacacacacacacacacacacacacacacacacacacacacacacacacacacacacacacacacacacacacacacacacaccccaaatcaccttctaggaaagcaagggcctggaggttgcccagctgaggacagacaatgacagccagatttgtcacaactggaaccagctggctggcatggagccttgagacagtgggaggttagcgtgtgcaggaggtgaccatgagcaggtaagtgtgaacagaaaatcgaacccccaagttccgggggctccagagtttccacatttgagctgaggagaccagcagacttccaccggttttgcctttcccacacagcctccatcagtaagcaccatgaacaaggaccccatggccaaggccatgcaggctggcgaatattccacttggaaggaaggagtgttgtgcatttgccccagagaccctgacactctgctggtggaggacaccgggtttcccctgtgtttttaagcagcagctgtgctgacagcatcaggaatggcgtctccatggctggggccaggcaagggaagaggctgcaggaagtctgtaccacccttcttgcttgtaggagtagggacagacgatagggcaggacacagagactcaggacctcatggccatctgggaagcacagcaccccttcagcagcctggtccactcccaggagaagcagctcaccagggctgggtgcggggcagccttctctgcaagcactttagtgtaggaagctggggaaccaggagaaaggttccaggcctcttctcccagctacgacagttgacacgggaggaaaggaaagcacctacaacccagatgaattccatcaagagatgaactcagactgccaacccaggctttgaccttcccaagtggcttcagatacctctccctgacctgagtgggagagtgtttcccaggtctgttcctttgtcacctcctaatcaccacagcatctacacagcctccacggaccttccctgagtggctttaaaagttctaaagcatgacaggtccttctggcctctatcggcatcaggtcctcccatgtgactctgaggaagctggctggctgagtggcatgtcactgccttgctcactggcctgagtcagcctcctggatgatgagcccaatggtgaaggggacccactgccagctaccatggcttctgtcacacacactcactgccccgcccacccagtggcagatggcagaactcaagtcagtagtcatgcaaacacagacaccagccccagccagcacagcgcttgcttgccgtgtgggtgcttgtgacaggctggggtcctgtggccttgtgctgaccttcacaaagcctggtggtggcaggaacatttttatctgtcttacagacgaaacaccccagttcagcaagtcatttcccctagtgcggcagttctcaacctgtaggtcatgacccctttgggggtcaaatgaccctttcacaagggttgcttaagaccattctacatatcagatgtttacattatgacttgtaacagtagaaaaattacagttatgaagtagcaacaaaaataattttatggttgggggtcaccacagcatgaggaactggattaaagtaaagggtcacagcattgggaaggttgagaaacactgccctataatccattctctcccttgctggtaggaatcaggtcacactgagaacctgcaaaccatcttctgtgcctgtctacagtgagggccccttccatgggtgctcctgacatggcttttgacagctagcattgcagataggagacaaactcaaaggcagagattctggttgcctccttagtggacgagcccagagcctttgtgacatgcctctagttgccaccaaaccttggtgacatcctgttctggggctggtacacttccagcacagtccaccaagtgacataaagtttacgctctgctgggtgggatcagagctgacgtgagcttgcaggctacggaaggatttgtggatggacaatgtgcaccggcgctcattgtggacagtgaggacaatgccacaaacaaagctggtgcgtccaccaagaagagagaagacacagggacttctggggacccagggcttccactcttatttcatggcaagtgctttaaccaactaaatcacaggcatgaagccttcgggtaattccttaagcgacctgaactgaaccagtccttggattgttgtcctcttgatcagatcagccctggctaggccttgctctgtatccacacaccaggttggggaatgcagtatttatttatttatttatttatttatttatttatttttggatttttcaaaacagtttttctgtgtagctttgtagaccaggctggcttcgaactcagagattcgcctgcctctgcctcccgagtgctgggattaaaggtgagatgcatgagaacagttggaagcctctgagacttgaaattgctgaatcaacggaagttactctgggcagcttcgcagcttgcacctagcccgaagctgggaaaatatccagagaatgtaaagaggcatttgtgatggggagaaaaacaagcaaacaaacaccctcctaaaacaaaagaaacacaacacaacctcagccctcttcacacctggactgtgggggatgtcacaggagggggagggggaggagagggggaggagagggggaagagagggggagggagagagagacagcgtgagcataagtgggcagcagcaaatgttaccagcagggcagggtagggcagttccacaccgtgctgggcttagatcactgtgaggagaggggcggccacagcctgacccacacttgcctttctcctcttcctcatggcctctgcctcatgagcaacttgggcttctatttccagaacacaaagccaccttgcgtcttgccaccccctactctggcacctttttctttcggtagagatgacccactgtactgagggccttggctgggccgacaggcggaagcctgggtagggtctggctctgtgtgtttgtgtaggcttctggagaggtggacagtccctgggcatgcctccctctggctgcctctccctttgggtgtctgcagacatgctatgggatgtaatgtcttatacgaaaaggaaggaactgtctctaagagtggccagcgacttttgaaaagcagtcagaaaatgaatggtagagtcaggggtgagaggaggcatggggctcttagcactggctgtggggatgtggggcctctggcctatttccttcaaagtagctatcagcaagggccgggcacaagatggaaatgaagggtcccttgtccaacatgaggtaggaatgtccaagcagggagggcagtggaatatgaccttttcaaggccagggagacgtgggctctgctgcatggctccccagggctgtcaggagcctcagcctcttagccaacccctggctattgcagagacacagacctcctggagacagccacagctgtcccagctggatccttgacctcctgtctgcactccttccagtacctgcttgatgagtcctttgccaggttcgggaagagctgaagtgagaagctgtctcccaccatcttgtctattgtctaaatgttgcctaccccctacagtgctggactgtacacacaggcggggcatggagccgagagccatccagccttagagtggggaggaccctctattcttccaggccccactgcccttggatggacacatggagacctcagtgtccccatctgtaactgggcacccctgtggtcccatggagtccctagtgatacagacacccccgccccatcttgccacgtgctctgctcagcacatggccaagtccaggccagccataaggattcactttgtcctgacttctgatcctttttgtttgttttgtttttcctccaagacacagtgtgctggcagtaatccaccaggagcttccaaagggccagcgggcaagtggggtggccatgaggtgagctgatgcgtgattgatggtttatggatccccacacccgggcccccagtgctagacccaaaccacccagtgtctccatcctgcttctatccagagcagtgggtctccatcttcttatgctgtgactctttaatgcagttcctcatgctgtggtgaaccaacccccccaaccataaaatgatgttcattgctgcttcacaactgtaactttgctactgttatgaatcataatataaatatctgatattcaggatggtcttgggcaacctctgtggaagggtggtttgaccccctcaccaaggggtcgtgacctataggttgagaaccactggtctagaggctctatgaagctggatccccaaatgatcggcatcacctaaggggggctgtattttgtggctccataaggaggttagactctttgggaaagccccttcccagctgacctggtgctctagcctgctactttccctcccaacagtcctctttttatttcaatagttgggtaactcggcttttatttttagacacttttaaaggagattattttccctcttttagggtacaagagatgacggtgaaatatctaaaatatcactgcaccttgagtctcctaaaatcctgtcagactaatgcttgacggtacacgcatgagacaggtgtgtgcatgcagggaaatcacgtggcgttgccaggtacagcactgacatcactggaacccccacagcactgacatagttatttccattttgcccgggggcactgcagcttccagttctttgccatttaattctgaaggttttgtttcagccaacaggatgcccaggccccccttgtctctctcctggttataaaacagcctcacataagacagcgagcactttgtcactttgtcacaagactgacctttcagatgggggagccctgaagagacctgccctcccctccctctgagaccgaggcttttcccagaatgtcctggccgacacacacttttggaaggcacatttgacaaagagcagacggggaagggctcattctgtattagaccttctgctctgctcttgcagaagtcagagacaaactcattgaattctccatgtttgggaaaaatgccttttccccctttctctttcttttggtctttccataaacgcagctagggtttccctagtgattggtgcccgccctctctggggaaaagcctggtgcttctcctaggcctggtggccaactttgttcattgtgatctcctggcagaggccccagaagggtggtggggtgcaggcccaggcaggtagggcactcaatggcccttcctggagcctgcttagaaaccgtgtcacaaaggccagtgcgctgtgctccaagaggacggaagatttgagaaagaaggcctcgggtgtgggtaagacaggtaactccggctaaaaataagtctgtgcttgcgactgatcgatcaccttcccctttaacaaacaatactttgaaactaactgaagaagcctccatggctttgcactgcctgcccacccagcccagcccttgcattgtccccacaagggggcagcttggcgccgttttttaagaactattctgtctttgcagactacaagcttagggtgggaattacccagagagctgaggggagcccaggaaggcccagcatgcacatgtgaaatttctgggtcctgagatgcctcccacctttttcaggtcttagagtatgtacgcatacatcatgctctatcttgaaggtgggacccaagtctaaacatgaaacatacccaccccattcacatggcccgaaggtgaccttatacaacatttttagtgtacctgcattttgactgtgactcaggcatacaatttcctgtgtgtagtgtccctgttgatgttcagaatgatccagaatttggaacattctggattaaggatcctcctcttgtatttcctgggacagggagcaaagacggttggtcttcacttgtgccgagccctggctgttgcaggagtggaaggcatcactttgctgagggggcggctacttggtcagtgcacactcctagcagtacattcagggcagagacgggaagcctttgtgtaactctccagcggggccctcctgctcagctgcctttttctgttgcaactcaaggctcagtttctagaccaaaggcagtagccagactcttgcctgggatgctctaccagtcactctccctccctcattatcttctagaaccctggggaaaggccttagacacccctggccaggacaagactgcccttgaagagtgcctcgacagctccttaactacccacagagggacagggtcccactatagacatggggccacagtggacactcccctgtactcttgtatgcccgagaccctggagtgcattccatcttcctgtctatctccaggctatgcagcccccttagctaaaatgcttgagcccagaaaggttttggatttcagggttattttcttcccttcccatccagctctgggactctgggatgtcttcactggcagccatcacgtgcagccaggactctagggacagaagcaaagagagctctcccactagagaccttgcttcaagtcactcttctccctgagcctgactttcctgacctgcggccaaagggacctgcgatcccctcaaaccaatctgtattgctgttgcccaagaactgaggtgtccttcaggttcctgggcctctctgccaggcgggcccagcaattctgtctctggtgtgaaggtcaccacttggctttttccctccttctcccagaactaaaaataatgtcagtgaagtggaggaggcggcagatgggggaagtgcctgcccacacgggggccatgcctgcacaggggctggctggcctcgggctaggcctcatctctaaaggctgcagccaggctgagaggaaagtaacaatagtgggaaaccgggagtggccaccaggaagagcatggggtggggggctgctcagttctctcccggacacttcctcatggaaaaaggcagaggaaggttagctttcgtctgggaaagggagccaggcaccgtggctgtccccaggccctccccagaccccctccctctgtgtcccccagagactttatttttactttggtaaatgcagaaaaacaaggctaaacaacgaagggtggaaatttactgagggccctctgtcttagagactgatctctcagccaagaggggtgagaagggtgcattcccaacacacctcctaaagagaatttcacaggctgaggggccagagagctcaattcttctcctgcctaaggctctggagaggctgggcagagccacagcacatggaaacaggttttgaattaagggcctttgacaggcataggcagcaataagtatttgatatgtacaatgaatgtatgctaaggttatttcatcttgtcatggatatactctcatgatcccatttacagatgtgaacactgaggcaaacaggttagtcaatttgtccaaggttctagagatggcaagtgacaagccctgttgggagtctcaggtctgcatcattctgctagactgcttcctttgtcatttctaacgtgtcgcttgatagccggatgaacttgggctcagatcctgttagtcctggctgatggttctgggcaagttaccagacctttctgagcttcggttttctccatctttgtaaaaatggaaataccacgtggcctataccatcagccagcaataggttgctctcaaaattaaactagaactttgcctgtgtggggcctctctaaagtcctgtttgctctctgggctcccaacagcacaggcctgcaggagatgaaacccaggagaggtagtgcaaggtgttcgcagcaaggcttgtcatcctccatggctcccacctctccgggaagggtgggggaggcctccccaccagaggaatggcctgctccgggcacctaagtcaccactgctgggcatgtgtgagtattcacaggatattcagattcaggagcctggcagagaggccacaaatggaccacccagggtcccatgggctgttgagatcatctctgctgttcctgaggcaaaaggacacgaggcggggcacaagttctttggattggccacacgtgcgggcacatggacagctttatcctggctgggagacgacatttagaaaggcaagcatctgaaaggaagtttcaccacggaaggcggaaggggctcaaatgtcaccttcgccccccctttcacaagcagcttgcagaaggaaatctaattctgaacctcggcctttgtagactcctgcaccacccagagcctctgagaaaccttcgggttccaagtgcaaaagcccaaagacacaggtgaacatgcagaagggacacgaattttaactcaaaggctgagtgttgggaactcccgcctaaggaatttctaacaaggaaacttttgaggaagggcttacaggcggatcacacagctatatttagaaaattatttccaagcaagacacactggagcaattcatatttctgagagagagagtgccgagttgctgtggctaacggcactctgtaacatagtgcagactcgctaagaaaccagagctccccagtgccttcttcgggaagacactccagcagcctgtcccggaagaagcagacttgcagctcccaactgggccatgagtcatccagtttccctctcctgactggctgcctggctgttcccggtcgcagttcagcagccatgtttttgttcatgggtagaccgctgcgggcacaggaaatgggttgccaaaggcacaccagcgaacccccaagtatgaacgagatgcgtcatcctcagaacatgaagcctgggtcatcctgacgtctatggggatgtgtgactttcataaacagcccgactcattgccgttcctcttgtatctgtcaacttggggccctgctggtggcactgggtgctcgcttagcctttctcccctgtggtgtgagaattccatagggccatctttccttcctgtttcagaggtgcaaacaggggcacagtccgcctctgttagtgtcctcaaggggacataactggggatcatgctcaaaccattaccttggcagcctgtttgaccactgaaatgggaggggggcgctactcggaagagcagggacccccacagcctttccatctcttccccttaggctacagaattaacatttgtttggtgagataccatgaggaatctcaagaccattacgttgatatggaacaaacccaattaacacagcagcaatatccatgtgtcactacatgtttctacccaaaggacctttgcacttgaccctcacaggagtccccttcttgactgcatagcttacagaacgttcctggttctcttagactattgcagtactttccccactgtggggcatgagtgagtcattagaaacatctggaatggcagaggacaaggaatgaagagtggacctgagcatcctcctagccaaaggatctcaaaccaaagccctcactgtcctttgcagagtcggtataggcctcacccagccccttagtcaggactgaaatgcagaaggcctttgtggatctaggaagagaggattgcccttgccagtgcctacctgttgccttcctgtgcttgtcccagagtgggggtggtgtgtgcctcagcttatgaactttagtctggatggagcctgagaacggcacagggtgaacaaactgtcccaggacctccatcctctcgtagtgaccgaagccctgtctggtaagctgggtcccctcatggtctctggggatggtccatatttaggaaccgtagcatctcttctagggaacggaccagctgcttgatttattccccttgacttttgatgttattattaggttcatctgtctctgagtgaagtcaccaaggaaaaacccaaccagaggaaaatattttcaagtagtaggtcacttcaatcttcggaaaaggaagcaagcggataaactaccagagggttccagaattcagggtgaccagagaggaaaacggaaagtctgtgctctggggaccgctgagctgtatgcacaggctgcctctgcttccctttccccaagtgtagctccttcctttcccctaacatagaggccagccactctccctgatgctcaaaggaccaggaagagattctattagtgacaactgaccaggtgacttgggacagagccatcagactcaactttgctcagctataattacccctctttcctaaattagctgccacaacttgaaaatcagacttcatatgaaagctgaatgcctctttgacacacggagtctgcagtcatggcagcctgggactgaatagtggctgcttggaaagaagtcttacttctaacctgtcaatcaccagcccgacccctggcagcatctctgttaagaaacaaccaaacatgaatgccccaaagaaagcacaaagctccagacctcaaacatggccatgggctgtttctctatctgtaaacaacaggtgaagacaatgggccacacctggcccttgttctatagaaaggatgaggaaaggggatcaggagaaaggtttgaggaaccagcgtgagctgggcgccgtgtggccacatgggtatagagattaagacacacacagagccagggaggggacaggggaacaaacacgctagaagcctcagagatcacttaggagggtagaaaatgaggctgaagttttggaacttgccagctatattggagactgggttaggaacccagttccattgctttcctaggcctgaggccatgacaccaggtcctcctcattccatgtgtgtctatgtcttacatgaagcccagcctggccaaatcctggcagacagagaccaagctgtctgaggactctcctggggtcctaccctccatgccctcccttcctgcaaaactgacctatttgtgtttgactagctgtgccatgctgctgggcctgggggcagcctgtctgctggcaatcacctgcctcacctagaggacaatcgtttatcatttaaatggtacttgtaaatccttctctttgcaccttcccaggtcctgtattcccactgtgaccctgaatggcttctcctttgcagggttattcctccacactcacacagtccacgtcctttttttttatcttgcttagagctcattcagatggtctggttatatgggcatcactcccgacagtaactattcttgagggcaggaccccaggtcttagtagcacacttctttcccagagctgggagctaatgatgtgtgttgaagtagccatgggcctcctgagacctagctcctggctgagaaggcagaaagggaaccttgctcagcatctacatttatgattgaaggagtctgctggatgcagactgagatttctagactagaaagatgcctcatgcactactaggtgtcaagaaccagaagaagagcttccatctccactcatgtggcatagagattaagacactagtctagccccttgggacagtggaggacaaaagtcaaggtcaccctaggattaatctggacgtcccaagacccatcaaaccatctgcattttctgaccttaatgctgtccctggctgcagacatcaaggctggggctatgctctcccatagacccaggccagggccgagctctgctggctgtaagatgaacattagggcaggaagagctatacagaatggcatcccaggtcgggaaggggcttatttctagagtcccagctccacagcaggacctgtgtagacactcgtcccccaggccatctactcttggcctgcactaccttccttgatgaggttttagaaggactggtgctgagtgagaatcagctgatcctaccgggctttccccaagtccatttagtccctttctggcagcgccttgctacctccattctgtcccaagagtccagtgaccctggtttgtcatcctccccacccccattttttttttaacccagcacaaccatatccactatgggtgccctgctgtgttctggcttcaggcttaagcctggaagtatgaagcccagaggggatgagcatgggcctggctaccagagggtgctaagcagctttatagaggaaggcacagtcacaggccacagataagggaggcagtactttgtgagaaaggggaataaataaaggaagcttctgggaaagatggcatttctgctgtgtctttaagagccgtgacaggagagcagaacatgggcgggagggaaggtagaagggaggtggagttcaggcttggagaaagcatgccccaaaaggcaaagaaacagaagggcacatagaaaatgcaaatggggcagtgcctcgggacagagagggttaaactataggcacagtaaaatgcagccgatgggcaattatgattcaacagattccaactcacatcccaagctttggttcaactctcaaacactgtgtcagtcttaactttttttttcttcccaacaccagggatcaaacctagtgctgtgaggcacacgtgctatatatattctcctaggcctagacttaatgcacacaagcatcaaatacacacagagatgcctctcgcccctcacaagtatcataatctccagggaagctcattcagagaactctggttataaagccagccccagacacacatggagggagttccccaggtttcaggagtgactttccagcattctctgtcagcagcgctcactgtgagctggcttgtcccccaaccctgtgtgatttgcatgttcctgagcttagtctagaagttaagtctggaagcacgattgcaaaggtatggaaatcgagccccccagccccacccccgttgtctccattctgtcatttgaggggaaccctaaggctttggtttgtgttaagcatggtaatgggagttggggacatgcctgagtgggtggagtgtttgcaatgccaacatgagaatctgagtttggatccctgggccccatgtcaaagtcgaggacagaagcatggactgagggacagcagtggacacccagaactcagtggtcagtccagcggaaacagcatggcccagagtcagtctcaaagactaaggtaggaaaaagcaaacagagaagacatcccaagttcaacttcttgctctcacacatgcacacactggcatacacaccccacacccacactcacacagcacaaacaaaaaacatgtcaatagcatagacatgtgataatctcatgaactaaacacaagtggaaaaaaaatccctttctgaagtggtcatgaattacaactactattgcctaactcagagaaaagcaagatcaacgctatgcaaacgagatccattttcatgaagccccataaatttacagaagtctcagaaacagaaactataatgtcccttttgttattgctacaaaccagtatgtaacaattttccccattttttcacaatatggatgatgtaattagcaaatgtttaatccagtaataactctgcctttttgaaacatgcatgatcatatacataaaattcattagcagaagcttcgctttctccaattctttcctcttacaatttatttgttcttcaattgctgaagataatttttgtcattacagaaataaggaatttttgaatatggtttttctcttttgtttttaagacagagtttctctgtgtagccctggctgtcctggaactctttttgtagactaggctggcctcgaacttacagaaatccacctgcctctgcctcctgagtgttggtattaaagacatgcatcaccactgcctggctatgttgttctttttttaaatctgcttctggagtcagatatgctaaaaaacaccgctggtcatttctgatgagaaagttgggaaaggaggcgagtcacctggaatagctaagcaaaaaaaaaaaaaaaaaaaaaaaatcatctaatcattccctgccaccatgccaaggaattggactgctgtctataagcaaatggcacagaaaatggccaagaactctgactacaaaatgtaaaactgcccaagtgttaaaaggaaaagtcaagttaagttggagaaaaactttcataaaacacattatggttgaagacaacaagttttgtatataaagaactcaaacaaaactgcaaggtctcaacagataatctaacaacgtatgtataagccaaaacacacacacacacacacacacacacacacacacacacacacacacagagagagagagagagagagagagagagagagagagagagagagagagagggagggagagagagaaagaggcatgcatgcaatcactcatgcacgcacacacatataacaaaaatagtataccacttgtctatcaattgtgaaaaggctaaaaataacaaagaactctgcggagaagaccactgaggaacactggtgagacgtgctcccaaaatgcacaagatcttctggaaaaacagaccaggaggatgtttctagggctctaaaaatgtctcaacctttcattcacttatttttacctctggaaacctacttaaggaaaacactctaaaatgtggaaaaagttacacgcacaaaaatgttaatgaagccattgtttctgataacaatagtattgaaaataagccagcatctgacaatggaggaataactaaatgactgtaggacatccgcacaggattccatcgatcactgacccaactgatcatttggtcctcaactgtaaagactaaaaagctacatgaaagctgtttcaataatattaagctggcgggagacaactccataaatatgtgcatcatttgtttctttttatagtgctggcattcacatccagggtcttatgttagagacatgctccatcactgaattacacgctccacccacaaatggacctactttaaaaggctgcaaagaaatacagccatcggtaagtggtcttaaaagtgacctcaataaactctggccctttgcgctgatttctacttcttatattctactgttcagcacgcagataagctttcagttttcctcataccctttctgattaagatggatcatagaccaacagattaatcagcaacagaagccagcaacagtgacactgttaagtttgaggccagtctggtctagacatcgagttgtaggccagctagggtgccatagtgagaccctgcctcaaataataacaatcatcatcatgatcaacagtctgtttatgactgcagcattgcaacgatacacttttatttttatttatgtatatggatgtttttcctgtatgtatgcatgctcactgtgtgcatgcctgatgccgttggaagccagaaggcactgagtcccttggaactggagttacaaatggttatgagctgtcacactggtgctgagaactgaacctgggtcctcagcaaaaaactgcaagtgctcttaaccacggagccatttctctgcccctactctctttttacttattcaaaacttctattcagcttacttttttgcaatcaaatatgtacgtatgcacacaaacatacacacacacacacacacacacacacgtacacagagagagaggtcacatgagaagctgcagtagcagtttctccagttcttttgggcctcttcctgtgtctggtctgagtacaggctcccctccaacagggctcttcctctgagagacaagcaagacttccataccctctgcattggtcccacaagatcaaaaccaacctgttccctgcataggatgactgttctgtgaaaactccagggaacgttcatgagggaccactttgatggcagatagatataacagtttgggggtaggggactttctagtgttaaaaaccaggccaggaaaatggagaaatggctgagcattcaagagcacctgttgctcttgcagaggacttgggttcagttcccagcacccacacagagactcatgccatctgtaattccagttccagggactctaatgtcccctttccacctctgagggcaatagacagacagatatatatgcaggcaaaaccctcatagacattcaagaaataaaagaaatcttaaaagatgaaacaaaatcagaagaatagcagaggagatgacacaccccaaggaacccttccgcaaagagcagatgcacccgttggaagcagggaccatggtctcaaatatgctacaaatgcgatgcttcatagcagctccagatacaagtcactgctaacagagtcattcatttattgttggaaagatacttgatggaaagatacttgagtatgacagtgttctagatgtgggtgttgtaatataaaaaagcggccctcgagagaaagacaccatgtaacagatcttgggtggagggtttttttttattgggggaaagtgaatgggaaagggggggagcagagaggggagacccgcctctggggacaggggcagcagaagagaagagagaggcagagagtggggaggggcgaaggagagacagacaggcagacacgcagagagagtgtgcgtgagagagagacagagagacagagacagagacagagagaaaaggagagagggaggaaaggagggaggaagggagggggagggagagagggatgggaggtgggcagggccctttaaaatagtgaatgtgcacaggtggtgctcttagtggctgcagctgagggcgtatcctgtcagagccccaaggacaggccagtgcagatgcctgaatactaacagtggggtcaacaaagtccctaccttgaagcagcttgcattctaggtggaaggagaccacagaaataaatgtttcactgggtggtggccagtattcagaagattgctaaaggcaagtgtggggacaggggctggccagagggcaggggggaggcgtgtttggtctttgtaccgccttctctgcaggggttgtggggctgggctgtgggtggagggaaagatgctgcaggtaaaggcagagggtatgagaagaggggctgaggctgggcacgctgggatggtgtgtgcagtggaacgagactaggtcagtctctacagagactctcaggctgctcttgggatctggggctttatacagggtggggagcctcaataaattttaagcaaggggtgttctaaactgcactgctttgtgtcaagtggacctgggaacaggatgagaaagggtgaaggcaacaaagatcaaatctgaggggattgtagttgtccaagtgagaggggaatacacacacacacacacacacacacacacacctatttacattttttttttggtctttctgctttattatctacccacatagagtaagaaacatgacgagcatggatgcctgtatctggatgtcttgcaaatctgtcagagagctataggaaactcccacctattcctccgagagagagatcgtggccaccttgccccttaggttcattgttctcctgaacagtgagtaaaggttaagcaaaacaccaagggtgtcttgactgtgtttcctcttttttggctcagtgacagcatgtttaggggctggagctggggctggggatgtttcgtagccatatatgcccccgactcctcctagagggtgggcttcaaagaggctctcattgtctctcagcaacaagtgactctgaaagtaggaatgtatttttcaaatgtctaaaactaactgactccttcaatctctcaggctctccttgcgtcctctcacccacttcccactcctctgcctccgtcactgtctccctttgctcagtgcctgcccaccaagtgctgctctgctcccggtccacaggtccacatccagagcagctactgtagtgtctgttccggttcattcttggtgatgcgccaaggctgtgaccttcctattcacccacatgtgtttggctgcagtgcccctcaatagctaaggactctgcgtcaccactgtggtgacacttgcttgttccctctctacagagcagaagacagggcagctcaggagaactgcatttcgggtttgctgtttccaaggccactggtgcggactgtccaaactctatgccagggggaaggagccttgtccttcagagaacctaatagtatatgcttaacgacacaagccaaaaataaataaataaaggaaggaagctggagagctctctgcagcagctcatggtcacccgcccctctgggtgctgaggaggaagtggctgctgtaaccccaaggggaaatacttgcttgacacaggaaaatggaacactttgcactttccatcagcagcctgagagtagcagccacacctggaaagacttgccccatccccacccttccacagctaccccaaccccaagcatggactacagacacatccaagttcacttttctctctctgggagagcactcattgtaacttccctttccattggcaaggaatggccaggggcctctggggagctgtggaggggaggaagggaggaggctgggtgggtgtcctagagggaacacagaataagagacaggtcagatgaccaaccagagctccagtgcatgcctggccacccctaactatgggactctgggaaaactagttgttcttggtaccctcttctgtaccaagtggactcgccactggtgggtttatatgcccgtgttgctgtgacaatcacactgggtggccaacagatggagctcttggggcctgtacctacccagtgtcaactctcacaccttaaaatctgcccaagtcagctccccaactcttcctcctcagctcctctcccctccagcctcagtcacaccctgagccccacctgcagttgtacccacatttctgcagtttcctggagtatcctgttgtcaagacagaacagcgagtccaagtaccagaggcgggaggagcctaacggaagcaccagagccccaggactgcactcccacattctctgcatccaaaggcagtcttcatccccaacgactaatttgcctgctcaaagggtcagagtggccccaattttccatgtagtaaaatgaacatctggttgcagtgcgctgccttaggcaagagccttctaactcagaattccctgcagggtgattccaatgtttaaagccatccagaaagtgtaaccaaagacactccatcctacctcatttccctttagcactgcacaggctatccctagcacagagtcagccatctcggtttcaatattactggcaaattctaaggaaacaaagagtggcagtttgtataaaccactacctgcaggtcctggtacccttagggtgattctaagttcttttcatacaatggttgaaagatcttgggtctggggcaccaccctgctgcttcagttagaggtggggtactactgcccttcccacatgctcccctgctgtggtgaccttgagaaacaactcaacgttctgacatccctggcttcctcatctgcaaaacagggataacaagacaagctctgcctcaatcccaggttattatcaacgaactgagaaaacagattcgaaagtgctctacaaaccacaagacacgctccaagttcaagtcacagagatctagaaaatcaccttgagaagagcccagaaactgggaatattttattctgatttgttaagggacttatagcatactttgacttaagaggaatttggattgctgggcatagtggcacacaagggtaaccttagcatttggaaggtggatacaggaagatggtgagtagaggccagtttggtctacagtgagactccatgtctaaaaagtcaaagggtggagaagtgtagatacccagaagtgtccttgatttctaaatcagcatctccaagcaagtcacacaaatagcctgttggttcgggcagcctgcatgaagatataactctttcccttgtctccttctgcttattttgggttttgggttttaccatgttgcctttaaatgagaattaaaggtcgtctcctagaatcctcttcccaccctggcaacgggctctgcagtcagcaacacgcccaccccagcttggtgctgggttggaagtccagagctatgtgaaatgctgtttagtcaagatctcaagggcaaaatcatccccatcaaccttccctctgatggcatgaccccccaggaaggagaccgaaagagcttccaggacacacaaaggctttttctgctcataagggtatttaccaacccagcctactagactgtgccaggattggcgtgaaagagcagagccgggacggctctgcttcacctcctggcagatgcacccttctctattattagcaacccaggcaagatgccaccaggctggggacacccctttgtgtcaagggggaaggaggcaggaggaggagcatgtacaggagactgcagcagggggaactgcctgaggcatcctccagaggaaaagggggggggagttccaacagcctttccccttagcttgctaacctcagacacacctaaacttcaaagttcaccctggatgtggcttgaggtgtacccctgcacggctaggcccagttcagtcacccgaggcctctgggcatgaactgcaggagcaaagctggagaggcctagagaaacagtgtgagtagaaaattggagaagccctccctccctctcccccccttctgtgacaaagatgcaatttactggagccctatactgcagccccaaagcacttacactccctccaaaggacggctaccaccagtgcagtcctgctccatgcaatactttcattcctgtgaaaggtaggggaacatctttgtgttacagatgagaagcaatcttggagagcctaggtaatttgcccaagggaaaagcatggcatatgctgactcagtgggttaggatgaaagccagaggactatcacctccagctcacatgtgcacatgcgtgtgtgcatgcatgtgggcgctcgagcgtgtgcgtgcacacacacacacacacacacacacacacacacacacacacacacgcacgcacgcacccacgcgcgccacttgccataacagctatgcaattgatgagaagcctacaaaacacctattttttttttacataaaaccttttatttaaaaaagaaaaagaattcttaaaaaaaaaaccactatatttctgggcagcagtaaagtccagatttaggtagatttgtttaactccaatacatgcctgcaggacacacatctaaatggtatgaaagggttctgcaaaggcaccaacaataagtgacatttatttaccaggacagagtggcccagggaaagtcaaataaaatttcacaaaagtcggctaccaggaacaggtaagacagagtcaaagatactattcttttcagtgtttggagacaccagcctctgactccactgcagagggctgcagacctcttattgtgcactgcataacccagggtgagcaagggctgagtcctagcaggaaaccaagtagtctaaagtggaagaaaggttagaaactggactctacaccacagtttggggctcattctggccgtgccttcctgtgcaactgcaagtcaacctatgtgtgaacccatcagtttctacacctgtaacatgagcttgggatattgacaattaataggaaaagtgtctagcagtcaatgattccgaaatgttcattcttatcgtcatctggagagagagtggattcgatacttgggaggtggtggtgctgttgcatgctagacaagcactgtaccactgagatccaccggccggcgccagctccatgtactttgctgttggtgcttggtattatgtttttgaaaccgtctcactctgtaacccaggctggcccaaaatttactaagtagcacagttgctgggcaatccacctgcttggcctcccaagtgttgggtttacaggtatgagccaccagctagccccattctttgcctatttgtaaaaaaaccagggttgagctaggctttggtggggtttgttcacaggacactcattctaagtctctgtgttactaggaaggtagaaggtggtttcctgtgtgtggagtgaggcctccccagaagcatccacaggtgtcaatccatcaatagtctcagctagagaaacccggaaggcggcagggatgccggaagaagggcaccacaggggccaagacttaggcaagcattgctctgagggtaagcctgcgtgggaaaagctgcccatgggagtccttagacactttccccagggatcggagacttggtccctttccaaagccatgcttactcctttcgacatcttatcttcatggtgttcactccaatggcgatctcgccacttgtgaaaattaaaatgtacgccaagtccaaagaagacagtatctttcccagtgtgccagtcatctcctgtgtgccccacgcccttgctgcctttgctctcctttaagtctggtggtttatgttcctgaagtttggaggggagctaatctggtctcacagtgtcctggacctgacaaccccaaaatatgttagttctcagcctctgagcagagcctggaaagattaaccacacaaaagcaaagatgccgtggttgggatggtttgtgaggaataacttaatgctctatttcccctttcaattggtgttttattgggggaaggggagataagagatggacatatctatcagggtaactcaaggttatactcaaaactgcactggaacggtaataagggcaagcgatgctcaggaaaaagtccaatacagtacctacaaggaatttttatttcgttttctgaattaatccacatcaaacgtgaatgtttaaaaaaaaaaagaagttaaaggttactgttttaaattgcatttcacagggaagagccaagaaagtggctgacttctaaaacccccttttaccagtgtgaaaggcttagccagagaggaaatgtgggaaggatccagagaacgccatgcaggggagaaaggggaaacgactttgcggtctcttcactgatgcctacaccttggacctgttcacagaggccatcacccaggagtcagcagagcccaaaggccgctagggaccgctccagggtggcacatcacatcctcacggagggtggggcctgcaggcatagcgtgtccagcacgcggctccaccctgcctttccatgacgccatgcgccctgctccgcagggccaagagcgtgaaaggcggggcggaaggcggggcacagccccagagagaagggcggagccactaggggtgggcgggaaggagggagggcattgcagaggacggagggcggagcagttaggtccctacagcctggaaaagcgctgggcttcctgaatgaaaaccagtttgccttcctgaaagacagcaccagtctaactctggagggagaggaggagggaggaatgtctgtggccacgaccagaaagaacagaaagaaatccatcccttttatgaccaggagagtgaatgccaaacaatcgggggacttagggcaaaggaagccatggctccacagcacacagaggaaggagtgaagtacccacattcccagcaagggcaggcacacagagtggacatctgtcacaggaatttgtcaagagtcgcgactcattttagctgaagccaaggcaaaatccagattgtggaaccaagcccaggtacttctgttgtaccggacacaatttaaagttgttttgaacaccgggacaatctatctgccacccccccaccccgccccctttgaagtctctagacagagcagagcctgaccctggagtcaagcaagggaaaaagttaaaagtgaataaaagacatctccacccccgccccccagggtgcttcaggccttgtgaataatgggtgcagctatatttttccataatgccaaaaaaggatcccagataaccaagggggtcagcctctgaggtcaagtccctctgctcgccagatccttgagaatcactgaaatctccacttcaccaaataaataaataaataaagtgtgtcacccatgtggacattcagcagagcctttgctcagtttgcctcctctcatcctaacaaaccccaatttatcagaaaactgtactgcagcacccagcccacaggcgctgctgaaggctcctggagagaaccccattgtcccccttttcttagcctgggaatgacatctccacctgactcagccttctgccctaagggatggacttcattaactgtacatttagtggtctactacagacattaccatccttcaaaaggctcaaagaagggagagaaaggaattagtaatatattctggtatatactccatacctgccattacataagagagcttccatccatcccctgagctgggacagagatgggaagtctgaccactaatagcaccacaccccagatccagcccaagctagccagatgtcaggctgctttctgcaactgcctgcagcatatagaagaacacctttatcaaaaagattttattccaatgttaaacataagcaaagaaaaaaccaatttacatacttttgcacggtacagatttgggagttggactttctccttttccgtctaccacatttacgtgcctcagcccagcactgaaaaggtgaggaacacaggtccatttgctggtcatcttagcaacctgaaggacataatgtgcaactctcaggcagctgtcccatctcctccttctaaataaatgcacggtagcaggggatgggtagcgcacacctgcaatcttagtattcaggagacagaggcagcaggaccagcggctcaagattatcctcaactacatagtttgaggccaggctgccccatcaccttgaaaccctctggacacagcagagcctgtccttggggcttcaggggatgtctcagaaataaataaatgtctgtactcaagagtccatctcagacatccatgctaggactctatgttgcatacaaaatgaatgatgccagtaagtaaaaaatcaggtgcggggttctctggaaacagtgggttgaaaaaatctcgtctcccttaaggacccctctccatgagcaagcaccagtgagattggcagtgaggtggttcttaaccttggccacacatccgaatcacctgggacttgttgtccatgtccctctcccagggtttctgacctaagcagcttagagagaactctggcacagagagtcattaaagcttccaaagtttttccaaaatgcagctcagaccagatccatccggctggtgtttaatcaaagtggcccaagagggctaggaaggtgtaagtatcagtcagcgagcaggtctggttcttggaaacagtgataactcagagacacctgtgtgcgctcacagtgagatgtatgatggcaaggctaggagagggttgggaaccaagcagacagaaattcccatttaagccccgggacttccggccctttgtgtgacttgggtcaagccacttaattattgtgagccttagttatgccatctatacaatgggcatggcagtaataatacttcttctgcagggtggaagaattagctatagtagtcattactttgttagcacataagctgaccacggaattcagtatgtttactatgtaaagaaaagatactgtggcctaaccgtccccttcagagggatcccctttagagagccctacttccttgggagcggttgtgaaaaggaaaagaaactaaaagtggtgtgggaagcaggcagggcaggacccaagcattcaggacgcctctcacttttgttccccacctcaggtcacttgtagattccacctcaggagagggtgtatgttgacgaggacagccctcctgtgcctgacctcacttccacctcccacagtaggtggctgacacattgtgccttcacacacagttctgcggaagacaggtctgtctgcctcagcctcacgcctaccttcttcccaccctgcgagactcttgaaggaagccaggccccagaggagcagctggccctgcaacctgccgtgtgttctttacaaactgtggaaagctgggtggaggagacagaccctgggactcttgataggtatgagagacagagagaggagggaagaaatcccgcccctgcagcagcaaccattcctgaggaacccagaataaaacaacctcctgctaaccccaccactaccctctcctcatctggacattcccctttaacatccatagtgctgagccctataaagcgatgacggcaaaggattacattcagtccatttcactaatgaaaaatcaaaagctcaaggagggcacagactcatcaggggcggaactaagatttaaacccatgtccgtgtaacaagaaccatttgctccaccatgctacgcgccttgcccatgacttcaaaggccctatggcagctgtgtaacacatcatctgtgagatggggtcggaggagggggttggagggtatggaactaatctaagctctagttggtttggagtcgcaattctaaaaccgagctggacaacacatcacattcctttcttcatctgagaaaatgccaaggccacctgtccaaggacggatgaaggaagagaccaacagtcacagaagtcaaacatctttgcaacgtctgtgtttccagcatagcgttcatctccctgaacaactttgttttaaaaaggaagtcaggagagggcgtcagaccccctggctggagttataaatgttgtgagtcaccaaatgggtactgggcattgaatgtgggccctcctcaagagaaacaaatgctcctaaccgctgtgactcatcttctgccaaacccttaccagccagctggcctggcataagactaccaggagagaaatactagtctataagcagcagctggctagccggctccactgacttgcctaagttcaaaaagcactctccttctcagtgttggggaagtggacctgcagctgccgggtatcacagacatgacatgggatacagaaacccccttcttgggcagagccccttccacagtggagggacatgagaacaagtccctgggaaaagtggccacatctcaggaaaggtctcaggtctggctctttggaaatgaaatcctggccaatggtttcatttgttttccaggagatgtagtctgtcatcacgacacactttacaggtaaaaagccaggcactgattccctaagacttcctggaggtccaggtaggaaccacgtctagatctgctggcaccatgtgttggccatctgatcttggcacatcccacctcccaagctccattgttcataccctcagaccagtgtttcccagggtgcagaatactgaactcataaccatctggttttcaggtcctccatggggaagggaagaaactggtcaagtttctttttaaatagttttgtaagacactagatcttactatggtatggaacgtctggcctccagttaatctctcacatcagctttctgagttaccaggaccacattgacacctctgtgagcagcttcattccccttttaaagccctgctgatcccagcaccgcacacacctttaatcccagcacttgggagacagagtcaggtgcatctctgcgttccagtccagccaaagctacagagtgagaccgtgtctcaaacaaacaaacatagcctgtgtagatgttcaaaacaaggtggtagacaaagatagaggtcaccttccacgtactaggatggaaacagcccttcagcaggagagacacaatgggtccttgtcatgagggttctgtctttatacctagatctgttaatgttcccttcaaaatctggcatgtgctcttgccatccacaggctattttaatagccttggaatatctcaccacaaaatttggcttgagctggcctgaatgttcaatgcctgctgtatagcacactgccagatggctaggccccacccctgcccccaggtgctggcagcacagacccactcaccatttcccagtcctgccgagtcctctcaggtctcttggccattgataacacagatttcaattttgaatttttgttcctttggcagccagttactgaagttcaactcaacattgaagatgcccaaagctcccctcttcgcagacgagccttggccgagaagtcctggagcaggcatacccctccctgtctgcccacgacaccatggccctgcccttcagggcctccctgcagcctgatctgttctctgtgatctgaccaacgacacctctactccacctccaacaggcatggatctcgcccagcaggaatgtttagcatgtaacaggtgtttagctcaatgtttataaaatgaacacacaggttaactgattaaaagcctgaagacaccacacaggattgactatctcttatgtaaaatgtgtgggcccagaagtatgttgtgtttctttctctttttgctttctgatttttgaagatttgcatatacataatgacgtatcctagaaacagaactcaagtcttaactcaaaattagtttgttttatgtatgccttatgcacacagcctgaaggtaattttatacagcattttttagtgagaagacttttggtttaccatccatcatatgagatcaggtgtagaattttccacttgtggcattggtatcttcagtgcccaagtttcagattttgaatatttggagagttgggaccctcaacttgtgcaagagagagaattgtactttcttggtcatgaaactctagagctggaagtggaaagtggaaggctgaggggctatggcttcaccagtttggaaggtcattcttcggctgcgtagggagggacaacacacggaggttctgacagtgaaagatggtggaaggagagccgaagagcagggcgagcacagagatgccaacaggagactgcagaaaccaaccccagactgataaggcaagttgctgcaagaaagagactggcccactcagcacgccagataaattcacagactccacccaacacacacacacacacacacacacacacacacacacacacacacacacacacacacacgacttaccagggaagtcaaccccaggaagagccatgtgagcctgcacacttgcgaaccagtttttgtgccctgtgacgaagcgctagaggtgggtgggcagggggcaggtcacaggagcacctggctggccaaaaaacaaaaaacaaaaaacaaaaaacaaaaaacaaaaaaggttccggcaccgtaactacttactagactgctgtcatttctagacatgcctggtaatgactggaaggggtcctggtaaggatcacatataggaaaatatcatggggttcacagagatactattagaggactcaggccctttagaaagttttgcagtggtaaaagagctaggcttcaccttggtcttcaaagaaactagggaaattcaagaggaccagactactcaagtgtttttaagctcagtgggaaaaccccaaaggtcctgtattgatcctcccatcctctggggcccaggcctcctccaaccacaagtaatacatcctccatgcagtccaaacagtgcaacctaggccccagcacagacagtaaaactgtaggtcccacactatttagtgcccaaagtatacctacccatgagcctcctgcccaactaggaaccttttgtaaaatataatgggtagctatgcaaagcatcagaaaaaaaaaagatattccacaatctgaatatgtgcctgtttctcctgagaaacgtcttgtgttggtgataagagtcagatatgtaaaacaacattcctacaggtttgtgtgttggaatatttggtcctcagatggtggtgccatctttggcaggctgtagaaccatctgaacataggacccagctggcagacacaagggctaagcctgtagggctgggtttattggttacatagcctggcctggttcctacctgagtccctctctgcttccacgtctactgagatatgaggagttagtcatacagtcctaatactgagaactcctatatgtcttctctgccacaggctgtgtcctctacaatcctgagcaaggttaagtccttcctcgcgatggcagtgctccctttacgtatcctaacacgtcacagcagcaagtaaaaggaacaaatacagaaggactcctcatagctggcttaggtgaaaatggcggaggacaaccaatgtacaaggtgcccacagtcacgtaatgggggtaattctagaagattcgaaccaaagcctgctggggtagggaaaccacagtgtgaaaactcaaggcactgaagtcagcttggaccagttccctgactcatggaggaggcaagttgtttgtttttcttgtgtttctagtgtatttgtagacagtgagcaagaaaaaataccgaaaaaaggaaactttctatagcgtcatcaacaaataagctctggtccagaagagaagtcagcaacgatgagtgcagagtgtgaccacacagtgagataagaaccctaaaagcaagcaaagctcttcagcgtcaggctccatggctcccatctgatgtgaaggctctttccaccagtcacactgatctcctagagggtggcacacaagcctgggacttgacttgccctctaccaaggatccacagtacactcaaattccttgtactgaatccccaactttgatgtcagaggagagttagattctgctctctatccatggagaccatgatgccacccaccagaaaacaacccaagcaaaccttgtaacaaaatctggccctgcctttgccagcctgaagcaggaaagctgaggaggtcggtgagagctcagggccagctgctccagtgtgccagggctcatcagaggagactcatgccctgcggccctcctggggactcacatgctacagaaggaccacacagatgccaaacgtgggcagcttccttgcctgagccacactacaaccgctcctcacttgcaagaacccatttctgtgtggcctgctgctcaaggcaaggggtcatagatttaaatgatgtccctgagctctagggtgttcatgacctccacagacatcccagaacaattctgggttctcagtcaagaaagcttttccccaaactcatttttggttcatattatttattcacattttatgagacataagtaacatacaagagacattcacagagaataggtctctgtgagttctttattattaagctttattgtatatgtgtatgcacgtgtgtgggcgttggcatgtgaagaagccagaagacaatgtgttggggctgtttctctccttgtgtcacatggacttaagggaacaaactcaggttgccaggcttagtgacaatcacgtttactgactgacctgtcatgctactcctcatttatttctaaactggtacatagaaactgttttaattagatattttgatgtgtgtatgtaatataatatttaaataagattaactgtatttccccaatgttaattatttccttatagtaatttgttttcaaaatctattctacctttgtgaaatggacagtgtgctatcgtcacccataagtttccctgttttgtgtacatgtgtgagtgtgcactagtacacacatgtgctggttcatatataggtcaacgtcagcggtcttcctctggcatcaccatggcaaccatgcctgaactgaccaatccggcttcatgctaatgaagctcatcacaagtcacagactgcccggggggggggggggacagcggtggcccagggctgctgagaccctcgggtgcacttgggttgcttgctagtccaaggcagtgcactgatgcagctgggatgttcctgcatccgtcaactgtccgctcttctctgtcagagcacaagctccctacagaggcctgtatgacgttccttcatccacagccattcggctgcccctcactgctcccctccccaccacagacgctttacttaaatctagtagattccacgtcccttgcttggaactgagtttgttctgtgacctcctcagaatttttagcagctggtgataaaaacaacctctccaaggagagatgtttaacttcacaaaaaatcctaacgcaactgagatacattctcttgccaagacatctgacaactggcctattttaaaagtcccagccaataacctcttagaagtactctacacacagacagaggcaatgaatgaccaaaaaagtaatgaggccaacattagggttttgtttttcaaaagaagccagaatttacccaaccaaacaagactgtcttctaagtactccccacccccagctctgcacttattccaggggtgttgtgtttgcttaaaggctctttggaaagtgatgccacagaagagtctttgcccattcagtcttgtgcagggtaaagttagcaagctttcagttggcagctgtatgccaggcactgtgggaggccaggtggagggctcggggtaattgaaaaaggtctttctcgtgaggtagggaaatgagaacacacaccacaagccaggtactactcaacctgtattggtatgttacatttaatatataccccctcaaaccttcttaaaaagcaaagactgaggactgaaagaagttaaagtgacttggccaaaatcacacaattgtggagattgtggtgatcttgttgggctggggatatgaagtgcccatgctggtgttcaccacaccagggcagtatcctgaagcaagctgacaacggtccaacgactcagaagaggccctggtgggaaacctgagccagagctggcggcttcccattctacgtcaagcacgcgcctcctgtttacctttgcatcaagtctctgacagcacagtgggtcaggagtgtttcttcagatataaaacagggctttcacactccaactatttacgtcaactgaggaagacagatgctcaggcacgttcacacactgaggctcactcacacagagggccatctgtctatttaacttgtccatcccataggaggcagggatgtcgggtcttcatttcaacacgaccagacttgcttctgacaatagttcaaatatgaaccagaccaagagtccgctgacatgattgggtaaatgaaaaaaaaggcacatacatacaaggaaatatgatttagccctcctgaaaaaggaaggatttagagccagacctggtggctcaagccagtaatcccaactacttcagaggtttaggaagaaagattacaaagattacaactcactatggagtgagttcaaggccagcctgggaaaattatcatgactgtctcaaatagtaagtaaaagagacctgagggagtggctagctcaggggtagagggttttcttagcatctacaaggttatgggttcaatggctaggattgaaagtaaacgaggggaggagggagaggggctgaattatgacacaggctatacaacacgatgaaccttgaggatgtaacactaagtgaaaaaagctggaggcaaaagggaaaatattgtggtgtactactcctgtctcggcataaaatttacagacagaaagtaggatgtagctggctggggctaaagaaaaagaatggggagttattatctaaagatacaatttcgctatttagtttgatgtagtgttggggaggggggtagaacccagggccttgtacatgttagatgagtaatcttgccaccgagctacacctccagcccccagagtttgtcctgaaagatttagtttggcaattgggtggtggttatggctgcacaacaatgtaagtgtatttgatgctacccgagctatctggttaaaaccctaagtttattttttcatagttaaggaacttgggcttcttttctttggaggtaaggatacagagtatcttcctcaagggaactctgggcaagtctgtgtggtcaccttctattctcatcccagcctcaggtcagaagggccgcagaggagaaagctctgagacaggctgggtggaggccgaccagggctggctctgccagctcgcccagtgagtaagcagctattctaaaatcagactcagaaagtccctccactacctgtgaacaccttagcccgagcctggatcagaggcaggaaggagcgactctagaattagcacacccccctataccctgaaatttgcaaaataccacttttggttagttcagttggctcaatatagcacagggagtgtgtgtgtgggggtgacaaaacttttataggggaatacttgagactgaatcctaaggctaaaagtcttgaggaaaacttggttctctgacaaacttcaacttctcctaataaaaagtaatgtcacaatgccacacagctggttaatgccatctccatggctgggctctccctgcagatgctgttggtgtcactatccactgttctccacaccttcatggtttttaaatacgtattttatgtatttacttatttatatgtgtgcatgtttgtgtcaaagcatgggtatggaggtcacaagagaacttacaggagtcagttctctccttctataaggtcagagccaagaattgaacgcaagttgtcaggtttggcaacaaataccttttccccactgtgccatttcaccagcccgatgcactgggttttttttttttttttttttttttttttttttcccaagacagggtttctctgtattgcttttggaggctgtcctggaactcgctctgtagaccaggctgtcctctgcctcccaagtgctgggattaaaggcgtgagctaccaatgcccggcaatgcactgggttttaaactggcccaaatcaacaataaagcagtaagaacccaagaagcaacatgaatgtgaaggcaggtttcaggggtccccaggtaccctcagcacagactccccagtagtctacaatgtattatttttggctctgggctgccagatacatgccaaaacttaattggggagtcaacaggaccagtaatagccccggagaaacaagtattttttttaaatcagtatttagtgaggggccatgtgcatgccacgcctctatttttcaaaacccgggaatgtttagacgtcattttaaatgagaaactagaagaacttggcaatatgctcaaggagcagggctaagaatcaaagtttgcactctttccattacattagaatgcttttttttttttttttttaatcctgtttgcctggtttctcaacttccccgagttttccacaggccccagcccagcccaattttccatttgagtaaaaagaactccatcccagctgctgtgacccaagtcacacgaagtggcgggaagagacccataaacacgagtcccaaagcctccttaatagacagaaaagtgtatcatcatagaggagcttcgaaagaaaggcctcccgagctgtggccctgggcaccttcccagaagtcacttcctgtcctcgccctgcactgccatcgagaagctgagcctgggctccagtggccccgtcccactcctcagagcctcatggcctaggcagtaagtgagctggctatttctgtaagatagagtcacacagctacccctacctgcttactcccaggagtgaatgcttgccgtatcatgtcattcaagatgattcaatcttcaaacgcagaatctttattttcagaaataccctcaggattgtttagatgtgaaggtaaagtccactgggagtgagtgaggattgtatgaggaaggtaggatcccagtgatggtacctggaggacaccgtaactagtatatcaggtcttctcaccatgggatactccctagactttagtatcactttctgtgtgtgtctatggaacccattgcccgatgaggcaagaaatcctcaacagaatgctctagagttccctgctctcccaaagcccaaggcaaatgacatactcttctttcttagttacccagcctcagctatcttgttacagcaacagaaaatggactaaggtgaccacccaagccagctcccatctgaaggtcataactggagatctctgtcgttaacaggagccagtcccaactttctgagttaaagtccagaaagaacactgactttcatttccttctggcctggataactcaagtacatccaaaatgccctatgcccgtgctcttaggaaaattcaaattatccaatggccctaggcagagtggaacccaccaaggagagtcctaaggaacccactgagtgcttacagaatcattgctaacaatcttcaggtttggatacctcagagaatatggactaaaggtagggaatcaatcaaagtgagggcaagatcacacaagtgattgtgacatttgtggggggggggcggggaggagacacggtctccctaagataaagtctgagtgaactaaagtcattcctcttctaatgcagccaccagaccaggaaggacattgtggggaaggtgttcagatgtagaaagtgagggaggggaatagtcccgcactgacaaagggctgggtaattttgggatcagataattacgtaacagaatgctgaaatgggccctgaaaggccgcccctctgcgtgcctcactgggacccctcctaagtgcaatcctagagacctcttatagctcttctcgtctgcgaggggcaacagacaacggtaggtgaccactttatggtttttcacatcctaggtcatttaagcctccaaagcaaagaagacagtgtcactacgcttatgttacgattgaggacactggagctcagccaccagcatatgaacgtgagcaatctttacacttaggaaccggttatctctgtcctgtgcagtggtagtggtattcctcctggcctctacctgctaaaggtcagcagtaccaccttgacagtgtgacgacaaaaaacatctctagacacacacacacacacacacacacacacacacacacgtacatgcctgtggaaaaccactagggctaatcattgctttaatcaagtgaggccactgagttaatctagactttgatctggtttattcaaggtcagggttaagaggttgccagggcaatatttcactataggttcctttatgcttcctaccctttcaagcagctgggagggacagcagatgcaataaatcacagagatcaggagccaaaattgtattagatgaaatgctaggccaatgccgataacaaaagaatataaaggtccatattctggaaatgggactgtgcaaaagtaaggctggcattgtgttgacggtagtcagtgtatcaattcccaggggtggagaggagcccactccatgagaaacagtcttgtgtgactctgaagatgcccgtctgtacccgagccagcctgatgcagaaggcttccaggcatcttgccccctaggcaggcaggccctgcttcaccaggaacctcccacctccctcaggagctctggcccttctgggggctgccatggtggtggcagcagcagtcatgtacagcacaaagagaaaagaaagaggagatggtagagggcatgggaaagagacaggaaatgaaaggaacacagcagggccacctaccactatgaggtcctcttcaagacagcaggagatggagggcaggaagagggcaaaagagaagacgcagggacaagagaagcaggcagagataaaggcagggagaagggaaggctaatcacactcagcttcccagaattatttctcacttccttttctcttttcccatcatgtccttcctgctccttgcctagtcactaatgcccttacctgccagtctaggggattcaataccctgggttaaaatcccgactctaccgataattagcggtgtcactttggtcagttttctaatctttcttttttctttcttcttttttttgggggggtggttgagacagggtttctctgtgtagctttggagcctatcctggcactctctctggaaaccaggctggcctcgaactcacagagatccgcctgcctctgcctcccgagtgctggaattaaaggagtgggccaccaatgcctagctagttttctaatctttctagacctttgtttccacatctgtaagactgggataatgatgccgaccttgtgtattgagcctgggattaaatgaaagttaaattataagtacatacataattacttggctgtgacatacgcataaaaaaggaacccacaggactttgtcacatggaaagttctctctggtatctaatattggttatgacatatagccttggcaggtagacagtaatcataatttactgcgtagaatacaggtttctacctctctacctcatataaagccaaggttcaagggggcagtggtgatacacacctttaaatcccagcactcaggagacagaggcagttggatctgtgagtttgaggccagcctggtctacagagttgagttccaggacagccagagctacatagagaaaccctgtctcaaaaaacaaaaaaaaaaaacaaacaaaaaatccaaggttcagaggggatgcatcaggcctgaaaacgccagtctctcagaaagttttctacctagaacatcacttaccagttatcccagttatcggctggtgctatttcccagggtccatttagggacaaagtgaccactaaggatgtctgacgacccccaaccccaagagaattcagacctgacgttagtaatggggaaaagtacacccccaccagttagtgctctgaatgtctcctaattgcctatcacttcccccaaaattgccccccccccccccgccacaggatctctctctataaccctggatgtcctggaactcactctgtaagccagactggcctcagagatccacccgcctctgcctcccaagtgttgggattaatggcgtgtggcccagctagttctagtactttggaaccgtgcaaccacaggggttctatggtccaaaactcctgtctagggggagggacactttgaagtgggagtggctcttcatcctcaaccaaagccctggacctcttaatatcactcatggaacgatgtaggggggcgcctgggagtcaggagaggcatctctctggcactaattttctaattgccagtgatagctgacaacttccactcaggaaccaactgaatctgaggtctcctcacatgtggactgggttttatgcttcgaggtcactttcccacacctcatctgtaggagccagagaaggcagatgatggggtcaaggcactacctgccccacacagcactaatgcaagagagagagcttctagcatttgaggcacagaattcaaaagggtgtttgtaaggattgccctagaacaccacagttctctgacttcacaagggtccctaagagaagccaagacctcccagcacagtcttggtcacaactgacttcccccaggcccagagtcactagccagaagtaaggtctccccagctgtgctgtccagacagcaagagggacactgtgccagagttgaacagcactgtggcctgcagggacagctctgcctgaatcgactcaacccgttcaatcttgttattttgttccctaaatgtcatgggtttagctgtcaagaggccaagaagaatcacccaaactggatggttccttaggggcacaagatctgcctggtttaatctgtgtttctacatcgctcagcacgatgcctggcacggatcagctgttggggacatttctgttgatgtgaaagatgagactatgttccctgactcctgaagatccctaagcccacagctcattcccagatgaagcagggctgccctcaggagtaagagggcagggcaggatgctggctgtgctaagatgtggcacatacctttgggaacctgtgctgtcccagaaagaggaggggctgggaagcacaactccacatgtcacttcatttcatatcccatgttccattaacccttctctggggaagtcagaggtcaggtgacaggctctctggcatatgagtgagtcattactaagtccagggaggctacaggaaagtagaagatgtatttagggaacagcatggggctgcaaaggaagggctgctgcctgaactcaaagtactaagaaggtaggcttggcctgtaaaggtcctggcatccaagaagaccctctagcagacctgccccgccccccatcagctgctcctcccacctgacctgctcccacctggcgtactcacaggtgtgttggggctccaggaagggccctgggcagggccatgctcactctgctcatctcccaggctggatcttctccaacccactgtttctatacactgaaaatggagagagctgagcttggcatctcaggacagataatcaagcgagtctccttggacactggggactgctggggaggcccaggaatgagctgccagggaagcacaatgctgtaagtttttctcccggtgccttgaactctccatggccctctggcctcctcctacccccaccacctcccataaggaaacagcgctggctttttaacaagctgataataagtgcctgttaggccaaggaggaggagacagtgtcagccaagaggaaggtacttagtggccatttgcttagttggcaggatggcagaagcagcagccccctgccacggcactgtgacagagaaaggaagggtgggaacttggggcagggactgctcaggctcagtgatcatctctgggggtgtttgccacagcaacctctcccaaccccaggttgctgggaacattgacacctttacccaatcacctataccaaaggcgtgtggaatggctaagatatcggctggcctccaggcagcctgtgttcaagccagagttttctctgacacttaagtcatttagcctctctgtgtctcccttcccttgtctgcaaacaagagacatatgttaataagcacttacgtcatggggccattttgagacttaattaagctaaactatccacggcatttaaaacaccaccatatttgttagccatcattatgtttcccgacagccttttgcttataggccttcctgggaaagtctctagagaccggtaccgcatatgcaagccacatgtatcccccagtcctcatgggaggaactgtcacagaagataattctcttgcctaaaatgctattgctgactgcctaggccgggatggaaacttggcctgtggcctcagcctccttcttcccacaaatgcattgctgcctgaggaataccagcttgggctccagcaagatagagcagtaacccagaaccgaaatgagagagacagataatgaaaaagagagaggggcacctcgcctgtgggcttctggtacctgcagctttccttccttccgactctaactaggggcactacaggtaaccctgcaatgagaaaccagacagcaggccgtccaaaatggttcatgtggatctaagctcagacaaaactcttgtgtcccagctaccatctaacaatgctgaatgttactccatgcccaggaacatcaagggcgttgggtgccactatgaaaagctagctgggttattcacctacagggagacggcctgccatgtagggtcagatcctcctgggaggtatcatcacagctaccaaaccccaacaggagaacacctgccaggctctctgtgtttaagcttcttgctaacagactaattgaaaacttgactgttctcttcttctccaaggacctcctcaactcccacactctgaaggtccatagcactcagcaaactgtctgcaaggcaaggaggggtgaaaaaacgtgctcctaaagcccaccactgagcaggcttttaaaaaaaaaaaaaaaaaaaaaaagcacagctgaaacctcctgcctcctcaccacatcagggaatcctaattctgcagaagtcagaagcaacagccatttcctgctcaccagtggctccccgatcagaaggacaaatcctcccttttgcttctaagttccatgcacacagggagagtgaagggcaaaggcaggaaatgctgggctcaagagggacagagacagcaaagtgacgtttgccccatgttgagcagggcatcttgtctctcacaagaagcatcggcttgatggctgctcctgctgcatggctgcgctcttcaagggacctcactatggctgtcacaaagcactatgccttcagagaggactggggttgaccacaccagcatagtaaaagcctagacttaactcaatcacttaatcacacaattcaattattcagcgccaggaaccattgaacggtgggcgggtggtaacaagggcccgttcacatgtgcctgcctcacttggacagtctagaacaccccctccaccactagtcagaactagaaaacatgatgggtgcgtgccaagactaacatagtttaaagaatgtcccccaactgaggctacatccatcaataatttttctgccccctccctccctttctggtactttcctctgtttcttgccgctaacctcaaggaactagaaattcgaattttattccttcccaattatacatctttctctgcaatagataatctacactgaccctatgggtgaaaactctgagctggtataaactgcaggtggtgatttatttacgcaacagtaaaatatctacaccaaatgtgccccgtgttacagcagcttaaacaatgaagtctaacagggactacagattccttcacttgccaaaggctaagtgtgtatgtttaagtgagagaaagtgattgcgacggaaaacggggaatgtctgagtgggtgaacgaaaaataaaacaacaacagtagagatattgctagaaaatctgacggcactcgtagtccactcacgagaagggcggagtgccagcatcctggggtgaagtgctgagctttgcaaaaccaaaggcgctctgcacacgggccctcgagaccagcctacatttctctgtccatatttacagtcatcggtactttaaccgagctatccgaggtccttccaccccagcccaggccggtttgagctgcagagctctcgggccaaaagagtcaagcccgaaatgccatctgccataggtgcagcggcaagctagccagctcgggaggggaggggaggggagggaggggaggagtgccaccgcttcacatgcgcagcagttgggagcggtcacgtgatgcgaagaccgcccgttacctaggcaacgggggcctgacctgctccaaggcactctgggtgtccgttctctctgtaggaggaacagagcatagcccttgcaccatgttgtgggaaccaactgtcccatcgctgccacttccgttggtgttgggagaatgggtgtacttatgtttggatgtccctatttatagaataggtacagtactttgtattgtttttgaggggctggggcctgaaccaaggggccttgtgctccgtcactgagcgacacccattccttggactttatgaaacagggtggttctactgtgtaacccaggctagtctcaaagtagccagccttctgcttcttcccaagggctggaatgcattatagatgtgcaggggacactaagttcttgtttctcgaagacttacatcttctgtatgctttttaaatgcccaaacccaacaacctttgaggccaggatatttctctgggtgctacaatgtccagcaccattggcagcttgcaaaggatatgggattctttctgcatcttatccctgaaacttccacttccccagatatcagagtgcccgtgtctaagtactgtttgattgcatcttgaaaatttaataagagtcttaaatgaaaatcactgttccttctcagcataaaaatggggccactatactaattagttataaatgttaacagtgcaagcccttcagaatgtttagcatgccataaaatcctattacaaattattaacttattaaattaggtctccagtgtcattatacgtgaccacaaaagtactagtgtgacttatcttttaaaacattatataatctaggccagccactacccatacagcgggtcactgacagcttcttgtatatgctgtacttgaaatgccgccggtgaagatgagccggactagacaagaactcaagtcaccttcatttcctggaccactatgaaaaaaatgaacagtcaaccacggacattgcccttctggagagtatcacattttcacactagggaaaggaacaaacctctgtgaccaaagctttggagataaaaaaatgacaggggaaggaggtttatgtgtcttgagactaagcagcacatcattttggcaggctgacagccaggcccttttctgagatcaccaactacttacacagtaagtgacgggtactccacacggctgtacccagtgtactaagagtcttttatgtaaatgtcacctggcttcaggttcatctaagtcttgaactagagtgacctttcttagaggctttcccgcccccccccacacacacactgtggagtttcctccccaacctcagactttgagagtttccaaacaagaacttcagtaattaaaaaacaagcacactgttgctcttgattggccaatgtgttaaatgtttggagatgaattcccaaataggtagcaaataagggcaacatttggtaaccatggaatctaagaaaaattcgtagctgaatgattcatccttgaggatactctctgatatggccaacacttcctaaaattttgtaaatatttaggagctaattcccttatcacagagttcacattttccagaaaccttctggtggccagaggaagggaagagagtccagaaatacaaaactgcaatctgaagttctgattccctttgtcccataccctaccaacttcctgagtcaaccccagatatgcaaaaccccagtttacacttccaggtacacatgccctcaacttcccatgagatagattcctgtttgtgactgccaagttactgttttaggtatgaatgttggggggttcttccccaactctgagagcaaatctctgtcactggagtcatgtatgaggacagccctctgttccaagctgctgggggcattgaggacaaggctatgagttatcaggcagagcctgtctatggctttgccagaagcacatgagaggtggttttcccttgcatgcagcaaaggtcagagagcttaccaggtccatccccttcccacaaaaatagcagatttcagggtttcaagtcaaaaagcagaacaaaaatttaaaggagtaactttaagcaaaagagcacagtatcacagaactgaactcaacactcaagataaacataaaattgtaataaaaataataaagaaaacaataggttaaaaacacagtgaaacaagctagactgtgcagtggttccctccaaatttagtgcaagagatgcccttttgcccacgtccatccctagaaagtctggagggttgtcacagatcacgaagccttcaggtttcaaaccggcagactatcttgtagacagtttttggttgtagataccctggaagtcagaatgccctgtgaagagcacctttctccaaaagagagtgtctggtcttcaatgacatcccaaaatggtgctagacccatggtgaactctccaagctggaccagcttttaaatgcatggataaggcccagaaaagtcaattgagtgctttgggtgacagggcaaattatatgtcaccttctaaagctggttggggccccgtgggaggaagatgccacacaagccaagagaccttttccatttcaaattacaagggttctgtgaagtctccagccgccactctgtctggctttctggacctgggcgtgtcagttgccactctgttgccgaggtggacagatgaccagaagactagggtgactagatacagtcaccatcagccaagtagcacaccggggcaccagccctcagttaaactaccaccgtcagcttaaaaaaggatacccaaagcctagttttcacaggattaggtgcatctccgggctccacagacccatcacaagaactggatacatatgaaaaaaaatcagtaagagggtctccatttccagactaattaagaacaatttccagacagacagacagacagacagacagagagagagaaagtctgtcagtctaattcagaataaaaaccatgttgccaaatgaagtacgattttcagagacttccattggatagaaaacatttgtaaaaagtgcagggcataaacacactgaactgtggttagtgtctgcttcatggtcagaaataatgtgtgtgtgtgggggggtaaataaaggccgccaggacaaagaaacacagagtccctcttgaaaaccgaaggattttgaagtaaaaatatatgagacaagcagatatttcaaactacaaataaaactcagtggcagaggggctagggagatggctcagcagtcaggagcgttgactgctcttgcagagaactagaatttggtccccggcacccacgtcaggcaacttataagaagcagtaacttcaggtccagggcatccaatgccctctggcctctgaggccaccagtacccgtgtgcacatacctctccccaatacacataattataattaaaataaaatattaaatctaaaaattaactggcagaaacaaatgtaaagaaatttgtttataattccagcattcaaggaggctgaggtataatgagactgtcttaaagacaacaacaaaaacttgtgatgggaaaaaggcagtatttaggccttgcaagtaatgctataattgattcattttcagctttcccagataacagttttggaaaagctatactttctcttgacctttgacccaatgttattcccagagaaacactgcccaatgaagtaacaaaagtgagaaggaaaaggacacactttacaaatatgctcctacataggtggcgaccatggccaccatgaatggcagctatccttaggaaaagaaagatgatgtcaggggttcaagctgtgagagagatggctcactggggaaaagcaatttctacatagcatggcaccttgaggtcccagatgtcacatgaaaagcccgatggcagcagcttgcatctgtaatccaagttctatgtctacaattgcaagatgggagtcgtggacagggaatcaaccagaagctcctgagtcagctaagcctgatggacacagcctagcaacagaagcaaccaaagactccacctcaaacaaagtagaagaaaagaagcagctcctcaaagttgccctctgacctccatgtgcacaccatggcatgtgcatgcttatgtatgtatacgcgcgagcacacacacacacagacacacacacacacagacacacacacacacatacacacacaccagtttgtggttcaccaccatgtactcactgcaattcgataagcgtgaggaatgtgcagttccgctcgagaaaatgagtcgccttgggagttaaatgacacagtccatggaagacatttagatgggcacctgccccccaacaacttgatcaaagttatacaagcttgctcttatacattcatttaaaatggcaagcagatggcctatgccagtgtgtgaaaaggaaagtgtgaaatgctattaaaatgatgaaataagagataaaagctgcccatgtggtcaggcctgtaactccaatattcagaaggcaaagacaggaagatcacaacagtttgagtccagcctggtctatgtggtgagttccaggccagacagggctacatcatgagacacacaccccccccatctcaaaatccccaaataaggaaaatagaaagaaatgtaaaaacactaaaatcagattacaattatatgtataaaataaaactaggcaatttatcatagacccaattatggttaggacgagttaaattactgttttagacgtggctctctgtaatgtttagtttttaatttgataacaacaataacaaccttgaagtctttgtagaatgaagtagggaatgtgggaggggcctggtgcaattcaggtgtgtgtgtctccccagcaccctaggaatgctctagcaataaacactaactgttgtaggccactactgtgacataggctgacctacacatagcatgtgacatgttcagctcaaaggcacacacaggagctatctgctgggagttcctgataacgacatcctaggcaaacatcagggtgagccaccctttcttctttctcggtaggatgctgccatgtccccaatcagacatcaagacagccactctatgactacagaaggacataagacaacacaccaggggaacaagaaagagttgcaaaggataaggtctgaataatgatctttgtcaatgaattagccaataccagagctgcctatgctgggactaactaagatgaggcaagacattttctgtattgtttgaagcaagagagttggaatttgccactagtcagtcaggaaacaggaaaaggccttctgatggaggcctggtgggcctattcagccctgggccaaggttatgacaggaccctcactatgtcccatcctgaggcaaaccaagtgtaggaaaggaggaaaaggccctggcatatccatcctagtgtacacaggagctatgcccaggtctgggtatattacagctagcagctagcagccacagtaacagagtccccacatctgacccttccccagggacctctggaccaccaactctggcctttctgtattttacacaaaagctgctgagaatgcacaggatgtccagctactcttgagtttcaggtaactgatgaaaggcaggtatgtcccatacatactggcttccaggctagggacatagatctttgctacatgtcagacacagagatggtctccctggtccagtgactgtctgggttgttctgggtgtgtctggcctgaccgtaggaggacagccagtgtctgtctggcctcttggggtctctcatcggtctgggaatgtctgatttgaattttataggaacaaacaaaaagtggcagggcttaaaatatatgggtagggagggcgttaccatggttttgagaggtttggaaactatgaggtaggctctggaagagacctgaaggtggggtgggggaagggctcagtggctcctgacttcattctctttccatgagagcttgcaatgaacaagacacaatataacacccccactagcctgagtgtctagtgtgaaatacacatgattctagaccaagggtggaaagcaacagtgaacagagtgtcatgactgcgacaactgtctatagacttaccttatctgtggtcatgttgtcctcagagtctttctgcacagggccatggcctacagcatgatccccttggggccagagacaatgtttaacttgcccagtgcagccctgtccctgtgcttgcaaacaagctcttaaataaagctgactgtgagcctggagcctcatttcctggaactttgctttatggttcctatctctaattggtcctgcccagagccaacactagcccagaactggggacgtaagtgtctgcaaagaaacagctccctgacagggagattcatgaccaacgatccacaaaattgactcacaacctagtgacagatgaatttgtgtcctctcctcagactggataactcctaaagtttggggtggaactgatcacagggaccttgagaaggtcagaaaagagacaagaaatggagtgtccttgatctcaacaatgtctttaaatgacttcttgttttctttctagaaatgggaagggagtctagacggaagctgccacccagaaggactcaagctggggtgtctatataattttcagggccctgtgaaaagagaaagtacctcttaactaagaagcaggagaaagtgctacaacatgttctaaaatgtcaaacgtctcctttctctcacggtctttctctaccgacttaacacagtttcttatttgctcttcgtcatcaccctggcatgttctctaacagtgcagatcctaactgcaccccaagcagagaaaggccctcaacgcaaagtttccatacaattcctttctcaccaagcaccagccagagccaggcctttgctacccattaacccaaagccaccacttggtatctggaggcttgaccctactgcattgtggctctgccagctcagggtggagatggccactaaaccctaccatggtataccgagggcacttgccatgtccctctttgaccccttgcccaggccccttttgagatcaaggtgccagcaattaccagtggaagcaagagggaagacaggttcccatctgagggggctcatgcttcattgatgaagaacaaatttttgttttgttttgttttgttttgttttcgagacagggtttctctgtgactttggagcctatcctggaaccagctctgtagaccaggctagtctcgaactcatagagatccgcctgcctctgcctgctgagttctgggattaaaggcgtgcaccaccaccgcctggcttgatgaaagcacaaatttaaagactgattattaagaagttcccgatgacaaacacagtgcactcagccctaaaggtgagtgaggctcctgagagtatggggcctggacaactccatcatcaggcagccaggagggccaaaccaggcggaataacctgttaagatgagggaagaacagaagaaaacaaaacaaacatagagattctccatttcagtgaggataaaagagcagctgtatcacttcaaaacacgaggccaaagccctgcctgatgcctgcctgatgcctgcgcaagacaattaattcatcatctgcccacttgagtttttaccaaagggagctaattcctgaattcctggcaatggatactaaccagtcctcagccttggtgtgtgtgtgtgtgtgtgtgtgtgtgtgtgtgtgtgtgtatgtgagacagagagggggggggcgtgggtgtgatgtgtgggtgtaagtgtcgggagagagaagtgaatgacttgaaaaggttccttaggggtcaaagacactgactgtacaatgagactttagcctgcccaaaatgtcagtcaagctccctttagcaaaaccacccaaggaaacttgaggtaaagaaagcttaactattaacctacccatctggccctcccatcattttgtcacggagatgccaaaggctgggaagaattccttagcagtgctgaccacgcccttctcagaggcccactgctccagccgtgagccgagagccgagagcaggagggaggtgtgattttcttacacccctgtgttctccctcttctccaaccagccacaggggtctccttggggaaaggttttctcctcacagaatgcatccctggtctgcccccaagctccaggggagactcaggaagtctcctccccagcactgtgcagcaggccagggggtggcaatggaaactttgcaaggcagaggtaactgtgtggttttatacatagcacctgtgtcttccggaaacctcagggcatgggcaacaggcttaaccagctccctcccatcacaggaaggctctgttcagaagacaagcccttcttaaaccctgctgccacagcccccagcaggctagagcctcttccagggcttccaggccccatccaggcccacagcttcctgcctctagcctttctcgccatgttcagccttaatctgaggcagagtgaaggaggagcaggtgttggcaaccactcccacaagatgggcaactgaaaaaggcaaagaaagcccaggcttcctgtgtcttcctgccaggcttcctatgtgcaattctccagagcccagatatttgcaaacactgtctgctgagctgcatgcagtatgcacacctcacattgagaaaaccaaagcgcggaaggcatggcggtcatggggcagggagcacccactgggaggaggggagctgtgcttggcctggccttacactcctcagactgtaccttactcaagcccacctgtccactgtgggctccgagatcttgggctcctgccagccctggagtaacgaggcatggatgcctcctgctcaggaggagggcctgttcctagaagctgcactgccctctgggtgagaaaagaacaatttgggtcagagtatgaaaatgtcagagtgccagagccatcactgagtgcccaggagcatctgccgggggaggaggaagttgcaggtgacccaagtcaggcagctgtcactcaggacagtgatgctcatctagctcagcacccatcacaccctcccctgggtgcctacgtgaacacactgcgcacctccatgcagctaaatgtacacacacacacacacacacacacacacacacacacactcacacacacacgtagacacagctgtagacacgtacataacaggtgtacacactggcatgccaccgtgtggcttttcctggggtgaaaacgggcaaaggcatatttaccccaggcatgaaaccaacaacagaccaaagtaacgaggtcatccaagctaccgtgaactaatgagttgaccaggcttctgttcaggagcatagatggggggttacttacaggagcgtgggtgaccaaaggagccacctcacagaaaagtctcatctcagcacaggtaggtgacaacttcagttcatgtcacagctcctacatgccgtagcacctcccgagaccatgtgtggcactgcggcaggagggagtgagagctgaaacccccagtgtgtctgggggctctctccccactcctctcactagcgagtgttgacagtcgcactatcagtaccgcttgttcacgaccatggccacaggtcccagaccaagcaccccatggctcaccacagcactgcttatgcctgcacacatccataagtgctgatcaactgcatgttcaccaaaccatacccaaagaaaaagttacctattacatacaaaacccacacgctgtataaatacatacccacatgtgtatacagacatatatacataccctcgcatagacacatacaaacgacacatgctatacatgtgtatacatacggacatatacccacattcgtatgtacacacacccacacatacacacaagaacatatacagcacatgtatacatatagatctatatatattcatatgtgcctcatatatttataagccgcatgtgcacacatacaacaactcatccacacagaggcttggatgagacgccggggcgagtgtgtcctgacccagccagctctttggagccgtctccccacctctgtcctgtggtcgccccagtcttcagactgactgcttctgtctggttagtgggcgccagtgcccaccccaaccccacacttaaggtccactgcacggttcagaaacagagaggaatccggtttggagaaaatgcttcagggggagggaagtggcaatcaactgctatttttatctgttttcctgagacctccatgcccctctgtcaggcctgacaaggactttgccctggccatgggtttccggtcccaccccatttgagatccaaggcagccagcttcctatctccccactccagggcttggggcaaagttgtggcctggaggagcttctagcatggagagaggactgtgtctggcttttccagcctcatctcagtggctgctggggcatgtcttctgagacaccgctccgtaaagccacactttagggggatgtcattcccatgacactgggttcagctttctcgctgcccttcctaccacatgactactcaaaagacgtcctgaacaactacctacctcatcaactaatctaccacagataggctgcatttacaaaaacaaacaaacatccaccccaaagttctaggcgttcactttaacgctcaaatatttccaggtcttctgggcacacagtagagctctattccctggctcctcagtttggtgacggcatgagacttgtctggccaactgaatgagagcagaagtgttgtgtcacatctctgagctacggcatctcacctcagtgggtaacctgccacgttccgtcagctcaagcctaggcaaggacaggaggtagcaaagaccataatggattgggtctgtaacaccagcaaggaagaaagctttgctgcttccagcagcttaatggggagttctttgttactgcaacatacttagttcacgctgatcttaaataggaaccacgttgctgagagaagaaaacaagaaagcagcaatagagtgggcaagaagtgtccagagaaaattccctatcacatacacaggacaccccccccctccacacacaagcctgccttgctttctcatgtttgtggtattttcctgtatgtgagtccttctgttctgaataccacccccttgtctacagccaggttagtaccttcaaaattcaagtcaatcagcaccatctctgagaatatttctccttctcatggccttagatagtgctggcatccatcctctgtttacatcccaaatctggccatatctctgcaaacacacttacagaatggattctcccttctctgggaaaactggacagaatgatgtttgtaggaggaagctgtataatcgtctcttgaccagggtactatcccttcggagatacctagaaatatccgagccttggcttgtagagacaaggtctcactgcaccacccatgccgaactcgtgggctcaaactgccctcctgcttcggcctcctgagttgcttggatggcaggtgagtgccacagcacccagccatagggacttttttggttgacaaaaagttctctgccaagaatgctactgaataccctatggtgtctcccacaacaacaaattaactggccccaaatgccaatagtgccaaggttgagaaactctggttctagaacaataatgtctgaggtcgtgtcttgactctcatgtcgctgtaactttaggtatatgacttaacttcttatgtaccacctaccacatgacaggtgtcaagtattgtagagtgccttctgccaccgacatggacattccacagtctagctagccctaactcccaggatgccttaggtctggcttgtgcagatcaagtgttatttcaactactttgccaccttgtgagagctagttcactgtaacaagataaaaccgtcaagacaaagagacagagagaaggagagggagacagaggcagagagagctatgagagagacacagacagacagacagacagacagacagacagacacacacacacacacacacacacacacacacacacacacacacacgcacagagagacagagagagagagagagagagagagagagagagagagagagagagagcattgtagttaacacaatctctgctacttttgatacattactggtacaaaccagagcagtgaacccctgagccagaacgtttaaaggcccagaagatagggcgggtacagctcagttggtggagtgcctgcctggcaggaaggggaccctgggttggatccctggggacagcagaagataaacacactcacccatctagaagaattcaagttctgcaaataccaaggccatctagaagaggggaattgagttagagtgcttgcaagattactgtgctgcggtcttaggtttaaaacagcacaaactgaatttagtttgaatcacaaataaagcaagagaattttgttttgtttttaattaaagaaaaaggtctgttggccaacttcaaaccatctccacttctccaaatgtatcaaatcagaaaaatactcagaaccagacaatcatctgtctcacttacacatgtgggcttggacccaaccccctgaacaccatggctgggccattctcgtggacctttgggagtgcagatggtcaggtgacgtctgtcttcctgagaccctccttcccaaggctctgagaacacaagaactgtctgctcgttttgcaaaaaaccttaagctcaggtagaacacaatcctttctttgtgacaaactgaacaaaacctcaccaaaggagatttttcatatcctataccaaggaactaacaacacaccttttcatttctcaggactcatcagaatctggtctaagggtgtttgcgctcacacacacaaacacatacacacacacatacaccacatctccctgcttcccgatggaggcaagccctccagaggatgctctggcagaatcctaaaataaggcaatattctgcaactctatgctgcttttaaagaaaattactttagtcactagcagatgtaattaatacttataaattgcatacccatatttttcttcatgacattaaaatagaggagatgcatttctagagcctttagcacaattaagtcaccgaaccgctggcagaaatgggcttcccctaggctcctccacacatgtgagctgtgctttgaaggaaccagccctgccacagcaaaggaaagagttgtagaaaagaagggcccatatacacaacatgaaggcacgtggaacacaggatggtttagggaacacacaccaggattctgttctagatcctgtgtttccctttcctttgctgttttctttcagggggagttggggggtggtagaggggtagcggctttgtttttccagagagacccagaagtagcccaagacaatggtggctgctgtgaggagacaatctgacatctgcttctttgtttttattttcaggaccaacaatccacaactttccttaaataggacacctgagtcagcctgggaggggtcctgtggagacagggtggggcaggatggactgccaccctgtctgtcctcgtattacagctactgccaggggtgcccaccaatcagcagtgttttattttggagttagaagatggtaagagcagcaaggcaccctcagctacatccccaagaggcagaactcacactggggctggagactggacacatcgccctgtttccacagcactactggccatttcttcccagtgccctatttgaagcccagggtctcacacatcccacgcaagcactcggccactgagttaaacccctcatcttgcaatttttttagaaagccagatcatttaatagaaggatgcattaaaggatgcataaaatgatattttaccaccacgagccattaggggtaacaaattaagcccagtaaagggctatggtgtggtagctcagtggtagagcaactacctagcatgcatgggtcctaaattccatcccaacacccgtaaatgaatgaatatttacacacaaagagtggcctttatgcctactgccagagtagctaatatttaaaggagtaacaattccaaatgctggtgaggatgtggagaaattccatcactcacattgttgagagactgtaaaaagagatggccattctacagggcagtctggcagtttcttgaaattaaataagtaagcaaaaaaatacaaaatgatttttaaaaaccaaacctaagtaaataccacacatagatgccagcagcttcacttcagggtattcattgtgaagaaacaagtccatgtttctataaaagaatgcaaacaaatgctcacagcagcttttgggggaaatagtccaacactgggaagcacacacgtatctcctcccaaggcctcaaaggaataagccaacttcacacaggaatctctgagaggctgccaccactccacctagactgactaccccaggaccagtcacccacagtcccaaatgccttcctatgctcacaaggaggcaaatgccattctcctttgtctttacaaggagtcagggtgtcccagttcacacctcagtctgaacatctcttgtgggtaacgaaccccaaggcaatcagctatagaagcctggtctcctatccactgtccctcagaaacaaagcattctttttctcacctaagcagggataactcctaatttaggggaggtctgtaggcagaaacctattttgattgccttcagttccaactgaattgctaacgtgctaccaggtccccagcaatgctcacccaactcactcaaaagtgtcagtgtcaagagtgcccttgctccagaacacatgggtgctgcatttgacagtgcccaggaataaagaggcccacgatacaccaggcctttacaggtctgtgctccacacctgcgaaatcctacacacacacacacacacacacacacacacacacacacacacctgtgaaaatcctacacacacacacacacacacccctgtgaaaatcctacacacacacacacacacacacacacacacacacacacacacacacgcgtcttgaagacaaatctgccctcctctgtcctctctctttgcagaaggcagagtccctgaggatggagccacagagtgagtacttggggtgccactgtcaaccactcaagcctggctttgtctgagcagccaggagctatggcctgttcctgccaccttctccttcccatcacctgggggctgcaacctggcttcactagttcatctttgatacagttgcatcaactgaattcttattattaaagaaagacatattcacttggaaggaagagttctcctcagctccacctccagcaacagaaaacccatcctgaaccagactcaaatgtttctgggaacagccatggaaacactgtttctctccttagatatggtattacccaagcaaccagctcccagagttccgcccatttcccctgtatccatgcacttgagactgggccctcccaaagcccactgcctacaagtaacttagggctctctgcacagggccctgctcctttccctaatctccaggtgactgcctgtgaacaacagagaatagatacaggtgagttcaaacccttgctgtgagctcggaactgacagttgcatctgtctaatcctcagtctcctcgaccaaaaggaggaaagggaaaacatatcttgcaaaaaaaaaatcatgcaaagcaatttatgcaatgtgtcggcatacaaaacatactcctgagacaacagttgctatcatctttgctgtcggtgtgcatactaaggctgctcagcacttttagcggcccgtgacatggttatttcacattaagtttgcagaaaaattatgactcctggtgagtttcataagaaatgctacaaatccaagttacctccatcccatctctatgtgtcagtgtgtgtgagtgtggggggggcggggggggaggtgacacgcacacatatgaaggccagaggacaaccttgggtgtcatacccacttgaggcagggtctgtcacttggcttggtgctcatccatttggctagactggctggccaacaatcaccagagatctacctgtctgcctccccagcactgagagtccaggcatgcgtcatcacacctggcttcttgactgagtgctggggatcaaattcttgtatttatgctcctaaggcaggcatctgagcattgcagccattttcccagcccaccgtcagctttttaaacctatattcagggctcacattccacggtcacagtgaactattttctaaggttcctaaaatctttccaaaatcagtgtcacttgtctctggcaacccaccacctggacctgccccttcaagctaacccatgggtccttagtgttcatcattgtttaaacttccagaagacccctcctgtcatgctaaagcaccttggtatttgaggtcaacagttacagaccagaaaatgcagatcaggctaaaacacatcagcaagaagcaagccctttgctattgagccacattccagccccagccctatgggactaagtgtagcttctcacagaaactagccaacctgaaggaggcagagaactgacagagctgactgctaatgcactgtgtaataccgcaaggtaaacagtatcccagatgctgctccacaaggctttcgcttgaaattaaaactaattaccttcctgtaatgctaaccagctcttccatggtccccttcctccaggaatcagtccctccatcctgcccatgacagaaggagcctggggactgcagagatgtgcatccaaggtaggtctgaggcactgtgtgcccacacgatgagttcagtgccttctgagaagacagggttaagtaagcctttacaaggttctattgacctctctgaagggctaacatcacaagtgtctgtcccatgccacagccaagaggaaaaggaactaccactccatgcatgcatcccaggtgtagcagggacacccacaactgtggcgtcactagcctgtgctaatataacttgccaccacacaacctaggctcctgtagtgtcttcaagggtctccaaagacctacctgtcaactcacccagctggtttttgatcacactccaccatcccagactgtggctgatggcaaagagtagccctggaatttagggagtcctgggaaaggcagaggccagaggggtgcaatagcaggctacacagaccacaagctttctggtcccaagtccttgtgaaatgtataggtactgggcatcattggttagtcaaagaaagcatcagaactcagtagggcctattttaatacacatgtaacaaagccagtcaatctgcatgcaacacacacagagatgcccctgtgcacgcacgcatgcacacacacacacacacacacacacccatacgcacacaccacacacacatcccagacatttgtgttcatggactatggagactctaaaagatacctgaagaaagcagaggactgaggggaaaggaaatgagaggtggcctcccacacccccaaacgctgggctttctgtggcagggctttctgtcttctccaagacagaataaagaggttagttcccagggctggtaaccagattccctgtgccagcagctgaatacagacaattgtttgtgaagcatcaccttcccagtcctagtaacaactcgaggcctctcccaggagtcagggacctccctgacaacgtaaatcctggtgtctattttgtcctgtacttgagatgagtggctgtgacacaggacacttagagatggcaagatagagacccactctaaggcactgtttagtggtgggggtgacaggggggtccctctctcttcagacccattctgcatccagtctgagtcacattgtctcatttcataacccacgagaaggccattcccctcatgttagcattaaggaaacaatcagacccccaaagtctcagcaaaggctgtgacagagcaagtgtgaattcaggtctggccgactcaagctgtgcactctccaggagaccactttgctctctggatcacacggcctgcctgcttcagctcagacatctgaaaatctcagcatcagaactcccgaaccctttatttcttggaaagggagaaagcgcccacattagaaataatcgccgggcacgctgctccactttcaaaggaaagaggacagcagaggttgcaagctcaggataagaggttgagggttggtttcattgctgccactaaggcatacagtcaccatctactgagcattctgtgtccagatggtctgtgaggcactgcaaacagaccctcacagaagactcaagaaccttacttgggaattgtccatcacattttatggatgatgaaacagatattgaaaagttaagccatttctccgagatcacacaataaggaagtgacagagtttaattgacctcaccccagagaatagcctgtctccatacacaggttcccaactggtgtcactcagccccagtcacctcccttagggttcttcatagattaaggctttgtagtatctgtggggcagaagtcccctctacccttgcggattgtattcctctgatcaactgggataaggtatggaaaggccaggaccccactttaacctcccagggtataatataattgtccaagtcctcatattccatcaactaaggaccagtttctgtggcgttaacatacccagccagtcctgagctggggatggtggccacctttcattcgggcctcacagagccttgactcctgggacggtctctgcttgagacttccaaaagaggctgcaaattcatcagccctttatcccatgctctgtacccaatggcagctgcccaaatccaactcctcgacgccccgttccacaccacacaccaaacttcctgagtttcacacgcccacaccaattcattatttattaactcatacttaatgaatgtgcttggccaatggcaatacaacttgttcttgagttttgcaaatcacaggcatgtgtgttggcatcactgtgtatcagagggcagatccccaaggacagcagcagcatcaatcaagccattctcttcagcatgggtactggtaggcgggaacaccatgcaaatgccaactgtttgggcagccactagacaggagacccagttccatgagaagagaggcaggagttgccagatacatcctaagatgggccctacagaagaggcacccagcacagcaccaaataaccactgtgagaactcaaaccacactttaaatcccagcactcttgggaggcaggggcaagcagatctctctgagttcaaggccagcctggtctacagcgtgagttccaggacagccaggactgttacacagagaaaccctgccttgaaaaacctaaattaaaacgcaagcctgaatttctctctttcagttttcagaccatcaccaagtcaaccaggacaaggctgaaatattggggctaccttaagcaccctcaatagagtgcagccccacctcatccattcagtcctgtcctgggaatggtaggcccctggctttgtgagcctcacttgctacagccttctgctgtgtctgtggtgttcatggcccactgatgagcaaaccatagcctgaggaggcagtgcaccctggtgattctggcaggatggccactcagaaggagacaatagtccagctgaagaggagacagggcatcacccaaacatccattcattccatattccttggtccctactatgcccatgtcagaatcagccctgctgcggacagtgctgcctctgtcacaaccttgcaaattctcattaagcactacagaggcaagtatggctcacattggcttagtgcttgccctggtccagccctcttttgttttgttttgttttgtatctgagacagggtttctctgtgtaacagtcctggctgtcctggaacttgcctgtagaccaggctgccctcaaactcacaaagattctcctacctctgcttcccaaatgctggcatttaatttaattaaaattaaaattaaaaggcgtgtgccaccaccacactcaatatatacatttggtccattcctcttttttttttttttttaaagactttatttacttattatatatacagtcctgtgcctgcatgccagaagagggcaccagatctcattcaaggtgcttgtgagccaccatgtggttgctgggaattgaactcaggacctctggctgtgctcttaaccactgagccatctctccagcccctggtctatccctcttttgagaccactttaaaagtagtgtcatagtactcaaaattaaaattaattaattaaaattaattaataaggatggaaagaaaatactctccctgaagccaggagtcactaatgtttccagtttaccaaaccagtcctgaggcatgctcagaaaaggtctaaaagaagactactgacagggctcctccaaattgcttggaatcagcaagacactaggaggtggttcctgctgtgatgactaagatgacaaatgagaaaggagaagagaaggagggggaggaagaggaagagaaggaggagaaggagaagcagctccatggttcacacctgtaatcccagcacttaggaggtggaggaaggagcaccagccagggctatataacagcatctcaaaaccaaccaacaaccaaacagaaacaacaagaggggagctggacgatggtggcaaacgcctttaatcccagcacttgggaggcagagacgggaggatctctgtgagttcgaaaccagccctgatctacaaaactacggagaaaccctgtctcgaaggaaaaaaaaaaaaaaaacaaccaagaagaggggaactgtttccattgcatcctatagatgaagcgctcatggtcacactggaccgctacctataaagggctttgtacagtttttcaaaccttaacagtgccctcagtccatccagttttcacacaacgcccccagtgtgctttccctgcccctgctcagcgatcggcatctcagggttatttggcactgacaaaatctcccgaccatttcttaaaccactggcaggcagttggattttccattcggcattgttaggagattaaactgtgtaggtcacagtcgaacctgggcctttatccagcttcccgttaccagattcaggtgagataagggttacaaaagtgatcctcccatgttcctctccagcgggccagcaccctttctccacagttggggaggcctgtgttactaaatctgccacttggatgtctagctcatgaggagagagtgcccacgtgtgcatcagcaggggggtagacaaacaccagctcccacaggaccgggtaagaaacacttagaggcgatcctgcccaattacacatttcacaacccctgtcatcaatcgccatagcgaggaggaaaacaaattgaattgagcttggaaagaatgtcagcagaaattggaaaaacccttgctgagaaccgcctgggggtgcaggacctcccttgtgatagtccgcgtcccactaacgagctcacagtataccaagagagactgtagatccagttgggcagatggccgggcaccagggagtcactcacccccctccacacccacacccgagcagccgcaccccccacatatccccccccacaccgaagcaggctgaacactccccactggcgcaggaaatgttaagcactagccatatatagtgcagtgtggcttgttgggaagcggcaaaatcatttactcattctggtcaaatgggttgggggaagagggcgcaggggacctttaagatagagaacgagaaggcactacactccaagcccaaagcccccatgtatgtcctcccgtgatgccccaggaccaactttataaaggaagcagggcgaataccctttcagagggggaccagctccctgcactgcaccaagtatcgtctctgggttaggccagccctgatctcgggcagaggtcagcggaaacaatctccacatctgcgcttgtcattctgaatcctgtcattttcctttctatccagatctcaccacaaaagtaaaacgagagatgaacaggctaacagtgagcttcagaggagggtggtgacaggtaagctctaaccacccagcaggcctgaaccagttcctactcattcagagagggagaaataaaaacacatcctcctcccaccctagatgacatcacacacaaggatgaatagtaagtagccaggcttcatgagcgctgtccatatataatgcattatagttcaggcctgcaatcccagctgctccagaaactgaaatatgagcatctcaaattcaggacctgcctggactataaagtgagtccaaagccagttggggcaacttagcgagactgtgcctccatttttattttttttaaataatttgaaggtctgcaggcctagcccagtggttgagtgcttacctagcaagcttgaagtccgaaattcccttcctggaccaccgagtagggacatcatggggtttgcctctgctgctaatctcctatatagctcctacttttttggttatttataaaactttcttattttcattttcttatatgtatatgcacccatgtggaggtcagagaacaactctgtggagtcagtcctttctcagacatttccacaggttctagggactaaacttgggtaggcaggtttgcactgtcgggaggcaagcacccttaccgctgaaccatctcaccatctcgtcttttctttcttttgttgtagtactgggaatggaatccaggacttgaagcatgtcaggcaagcattctcagtgagctacatcccctgccacagttacttagaaaacttaacagatgctctaaaatgagagaaacaaaaattccaagggggaaaaaaattaagttgtgttggctagtgtcctttcatagcgtgggcttctatcactcgatggcaaaggaatgaagtcccaacagatctcaatgggggaaaagatacggtttctgctgctgaattcttagaattattgtgaaaacatttctgagtgttgctaactaaggaaatgtgtatcctaaaccagtcctcactgcacagaccttggaagttcctgcctttacgtaggaaatgtcagaggactctcccctgaacagtcctctacacaaatgtgtcaagccagcctcgttcctcgacaccatgtagagcaggcacttctgtgggccaagctctgcgcagctcttctctttgagtccaaaccttaaaagaaattccccagcctgcccttgaacactagactgaggtggaagctaagaccagccctattcagtgcgacaacacacagggacaccaactgcacagcagctggggaattccagtttttggaaaacaaatttgatcgaagcctttcgggtatcggcaaatcattctgagggactgtgctgggttgagagtggacttggagatgctgcagagactttcttccacagaaaatggtgcttcccctgcctctccagtgctcacaatcttccaacaatgctgtcacttaccgagccactactctgtgacaccacacaaggcactcataccaacactgtagcatgtgactctcaccactccataagggcacactggttctcactagttctccagtggcttacagaccatggatgggctgtgatgtcaatataggcctcctaaacccaagtctagcttgcctatccccaaagcatcaaggccaaggagatcggcaatgaacttgtcttcactgtgcctattctcccttcatgcattttaagacagttcaacacttctatggatagataatattagacgcctgttcctccctctctcactcattcaacaaatatttgatttctcatattatttcatcactattgttatacaacaatagtgcatgggcatggtatatgagtgtgcgtgtgtagcgcagcatgtatgcggaggccaggtgacaactttatacagtcagttctttccttctgcctttgtgaaggttccagagattgaactcgggtcatcaggtttgcacagcaagtgcctttacccactgagccatctcaatggcccttagcacatattttaaaagctaggttgggtctttgaagatgagtaaggaaccgacccacttaagaagctatgtgagaagatcgtgaacatgggtcctatgacaataccaaacgtgccgtccacgcttcttcatctgtaagatgtgaccactgaagaaaataaaactctgtaacctctcaactgtaccatgttccgcatatatagacaatgttcactacggaaccaggagaaaacattttgatacttttaatataaaaaatacaaaacgagatcacatacacttatgtgtcttgtctttcagccaaggagatttaagctgctatactaatagtcacagttaacagttcatctggagggtggtttggtgctcctgggtccagcaggaaggcaagatggaggagggagggtcagtgagaagacgacgaggcaatggaggggctcagcctgaggtctgtgacagaactgtaccagtcaaggctgatggttgggaccatgagaccaagctggctgattcttccagacccccaaggcggctgttcagagtgagaagggcagcccactattattcttaaggaaaggctgagtgtgctgcccatctgttgaaagcaccgtagacacttcattaattggttcattgagttgagagtatatgaccatatgaaactctcaaggtcctgtaaaaccccaaaaggacaggtgacactctagagaactttcataaaaccaaagagtttatagttggtaggaaagcaatgccttctcctgattcatgggaaaataaagaagacacccatgcacgcatgcacatatgcgcaacacaacaaaccatatttgtcatggagctggagagcacagtgtacatagcttcaatgccaagctgtcctcccctatacaaacacagagattcctccacactgataacgtgaccacagtgcaattagtgtgtttgcttgtttttgagataggggcaacacacacacacacacacacacacacacacacacacacacacacacacacacacacacacacacagagtccaggctggcttcatactggaaattcttatgtatcagcctggtgggggtgtgctgagattacgggaacacaccacaaggtaatttaaaagaattcctgagttaattttgaatcgcctattgatttttctgaaatctacagaggtttttctactagataaaaattctttccattaaatcttaaaaaaacaaaaataaaaataaatctacctttaggtgactaagctggaaccagacagaataaaacaagcctaaacaatgttatcaatactcctaggaatttaaataaactatataaaatgaatctaatctgtaactacattcagcaagcatgtgctggcaaagccaggaaagtggcttggtagcagttcagctcttgcaaacagagctctgaggatgatttatgtcatcctggaaatccagttctcttcaatcaaaggctgacaggcttgctacttccttattaaagcctaaaggcaaggtatgtctcaaagtgtatgttttcagaccttaaatgttctcagcaaaggtagtgttgagtctctacctttctccctgatgttttaaaagctaagctgaatgcttccagtctctgataagacagtgctttgaagggacatcttggcactctgtcagcaaagccttggttttgaaacttcacatctgaggggcaaagtttctttttatctgtagccagaaagcatccaatgggcatcctttcagcacagttgctaagatctgtgtgattattaatgaaaatctctgggaggtaggtggtggcccatatctttaatcctagcagagggaagcagaggcaagcagatctctttgagttcaaggccagcatggtctacagagccagttccaggataggcaagtctacacagaggaaccctgactcaagaagaaacccctcccagaagaaaagcctcagttatggcactaatactaatgctttgctctgttgtaggtttctttttgctgttgttttttgaatgtgaagttacaaagagcccatcttttggtaaagggatgggtggaaggcaggcaggctgatcagtcaactgactccaatgaaagcatacatttaaaggtgcctgatttggacctcagtgccaagggccatgccaaaggatctttgtcacacttccaaatgtcctgacgcatgcttcacacctaccaagtttggagctgaatgtctagaattaagtatttgcagaaagttggaatgacatagcctccctggagtcacccttgaattatgcacagtgtagaaagagagaatgctaccagagagccaggacccctcagtgtgtgccccaggtccttttgcttttaaatcttgtctttgttttgttatcagagtaacacccagaatctcagataaatgattccaggaaccctagatctagacgccctggtccctgagagagagaagggccacctatcttcagaaaacagagcgtgccacctgaactcatatccccataacctgggcctttgacaccctcatctaagtttccagggggctaagagagaatgtctcagcagttatgaacacttgctgctcttgtaggactggagctccattctcaacacccacaccaggcaactcacactgcctgtaaccccagctctaggggccctacacattcctctgacctgtagaagcacttccacaacttgtgtttacacacacatacacacataaaaagaaaataaacctctttttaaagtttccactcaaaagtgctcaccactagataatcaaacataaaattgttacacacttcttaaaatcacacacaaccatctcaaatagattaaaagttgctacgtgtacaagttctttattcactaaaaacaagcaaaaatactcaatacctccccaccccaaaaaagaccaaagaaacgaaattccaatggcccttaaaagtagcaaacataaaaaaggcaaaggcattttagttccttctatagcctacaggtactaggccatagtttgggactttttaatgctttttttacagtttgatttatgaatttttgcatgttgtgtgttgtgtgtgcatgcatttgcctgcctgctcgcaccatggacaacttacagaagacaattctctccttctaccatgtaggttctgggcatcaaattctggttgtcagcctattagtaagcacccttacctgctgagccatcttgccggcaccttgtttcgcttttgtttgtacacattattgacagtagaattttggaacgaatcgatccaatctattttctaagataagatgcttctgagttacttccaagcaaaccccaagtgtgggatccttaagatgcagacatgctatcacaccctgcctgcacatccaattacaacacgagtccgtgtgcaacagaggacatgtgggaaagagaggccgtggtaaaaatccctagggtcttctatgggtctgggagccagggttggttgtgtgagcatgccatttcaaacctacatgtatgagtgtatgggtgtgagtgtgaacttgtgtgggtgtgtgttagtgtgtgtgagcaatgtgaaggtgaggatgagcacaagtgagcatgtgtgagagaaagcgggcacgcttgagcgtgctcagatgcatttgtagtagtgctgtacacacagaagcgagtcagagaagcaggggcagggctagcttcatttgccaaacatcaaaaggacggcccacaggcctcccaggtcaatcaagatgtctggcctcctgcagacaaaatagcagtcttgacccaatgagcagatggtttggtgttccagataagctctagcatcacagtgagtctaagagttcccctctgctcatagtgcaggctctcaaccagagagcaaaagtccctaggatcccataatttccagttggttacccacacgcctctgaccccaacacacattcatagtcagtctctctctctctctctctctctctctctctctctctctctctctctctctctctctctctctctccagagagcaacgacagcagggaatttctttttccctgactcccctccaggtgtttaagaaaacctgttcaaagatgagaggcaggtagatgggacaacagctcacttctacctctgggcctcttacctaacctgaaaacaccagttagctccctgcttgcacatctgtttttactctgacaaatgaaggagaaaaaaagagaagctgttgctgtttacctgttattatttatatcccctttcactccttcccagacaagatttccttttcaaacatggatgtatggagctttttggtaagcagtaggtaagagctgctcagccaccacaacagcacaacagtgagcaaatggaagatggataacaagtcaatgctgtttccgtgcttcagggttttgaaacaaaagggggtggggtgggcagaagaccctctcttactaggccttaactgctgagcagaggacaggggaatgccttccaagagaagcattttccatctggcttgtggccactacctgctccaggcagactgctgcccaccccttctctaagggggtatgctggtgcctgggagcaggtgcaagatgtctgggatccctgtcccagccacaaaatgccaggctgatcaggactcaactttgcatacaaatttgcctctagatcaccagcagacaggtttcagggaaagcaattcctgatcttcaaaactagaccgtgatttctgaagtagaagctgaaaaagaatcgtgttttagaattcaaaattttttagtaaagtgtgctgagccgaactgtaacgcacccactaaggatggagaaagttattggtgtgcaaatgggtggaatctcacattcaagatgaaaccagaggctacccactaaaataccatgcagctttccccacatggtagcctacaactcttgcatgccaggttaggaaattcccccatcctccctggagaggcaagagaaaggccatcccattttagaagaggtagcttcaacacttacatctcctaaaagaagctgacctcaagctggaattaaccgaatagtaggaatgaacatccgtcactgccacagacagaccaagagtcagtgtaacgaacccaaacacacaagtgcaaatgtgcccggaatgggcccatcgcaacttacacctggtagtgacacagtgtgcccaactcagacaacgcaatccaaatagcatcctgctacaaaagaaaatgcttggctcaaaagatagtttacatttcaatccacacgtcatactacacactagttacgtggactacattgatatcgccaagtcctgcctaacttactgagcgaggcttagtcgttgctcatgccatgggtcaaccacacaaccacatctccagaggtcagggtcctgtcacagaatcacctcactcacatttctgcctgggagtagagacttgagtggagccaacagaactcgtcgtcagcctgagtgaatcacgacattaagtgtttcgcttcatcaagcgaacgctgcattcgacagctcttcactatctttggaaatcaggagggcttgttattgttgacattcatgaatattatgtactttcaaacccatttttaaaaagatgtgaacggtagggatgactccaattcaactgtccagcctacaaagtgcttgggtggtacctctgcgacccgcagcaaacctgcctgtagaaaaatattggttgtgattccaccagagccctgctcggagtccttactgttcagcagaaagtaaggaaaccaggcgagtactcagaaaggcctgctgaaaacatgaattctaagaaatgcacagcaacactcaccactctgggcttctgctggtcgagagtatgcaaaaaggctgagttggggtccagcgtgcgctcagggtcactggagatgtcctcctctgagtcctcataggaagaggagaagccagtggaggaggccgaggaggatgaaagcttcctcagaggcaggggaccccgagggcttccttggatttcatctaagcccccatcctcctgagcacccatgtctgtgatgatgacagctgggatggcagggacgctgctggggctgcaggcctctttgaaggaggcctcgtccttctgatctgggggcatctcttggcagcttcgatgagcatctctgtcatgcagctggcttccccaagtttccatcagctgtacccctgtgtcacacgtccagatcaagggaccttcctccacagcactttgccaaaccctggaactctcaggctgcacacccatcctgtccccagggaggcaccggggttctttcaaatctgttgccacttccccaggtggtaaaggtcccagcattgtgacacaaagagtttctgccccgacatccctggtccctggctgtgctgcctggctgcccccaagcaagcccagtgctggagacccttctcccacaatgttcagggtctgctcgggtgctgggatccctgcgatcctacttcctgcctcctcaggacctacggagcctaggtctcctggcagtctagaccatctcgggtcgtccgaagcctctgagctttgggcattcacagtcctctcttctggccttttgatgacttcaggtgtccaggaaccttgcccaccaacagggtgaattcctctccccactctcccaggaggctctctaatgtgggtccggccaggctcggaggctgagcctgtctccctgtccagaaactgcccctgtctctccatctgcgcctcccaggggcgcacgccccggagctcgcaggctgcctccatgagggcagaatcatgtccagggtgtggtccaacggatgaggctgaagctgccactttagtggtcaatgctaaactagttccaaagtgctccggtgagggagcaaccctcttgtcaatttccatggctgtgggtgagccacagcggggattggcccgggtgcctccctccatcctcactgaagcagatggactctgagtccctaacctggtcgggctggcagggcgtaaaagaggggccactccctccttgtccttccaggggtgtgggctgagcctgcttctcctcccagagttggggtctggggtctctgtacattgatctccccaggactttgtcctccgttcctcacttggggagcactgcgccaagacccttccagggggctggctgctgcttcggaagggacacggggagggcgaacgagccctgcccagacgcgggcttcggggggcttggacggcagagctctgggcctggatttgcgcctcgaacatgtccactttctggttcacctgcacattttgcagttcgcgctgcagaatccgcagcttcctctgggcctcctctggcccaggtggggagagggtgcgggccgccaccacctgctgcgcgtcccctcgcaggcggccagcccaactcggacttcccacgccgctgctgctgctgctgccgctgccaccgccgccgccgctgctactattcagcctacgccggccgctgcgccagcccccaggactcgggggctcctccagcgacagtgactcggctggggggaagaggaaggaggcgcctctcccggggctgaagacgctgccggggctcagagcggccctccccgagggctgaggtgtgtcgccgccgctgggccgggggccgccactcttgagttcgttggtgctgttcatgatcaccaggctattgagggcatagcagtacacagccatagtactgggtctgccgcgccgcccgccgcccgccgcggctctccgtcccgctccaccgcccgcgccgcctcctcccgcggctcccggctcagtcctggaggcccggcggccaccgctccgcacgccgcgggagctgcatggcctaggcggcgggctcggggcacgatcgcgggctcggcccccgccccaagctccataaacgatctcgcggctgtcgagacacaaggaggaaagtcagactttcagaaggcgcagaggggagggtgcagagagccccgacccccccccgccccccgcagaggccagcgggagtccccggaccccagtgtgctgggggcagggtgccccccggatgcctggcctacaggggctgagatgctccgtgtggaggcatgccgggctgctcctgctttccggccgtggtccacctcccccagctctaagaacacctagaatcccaaattctacgattagtctcggtagccacgcggatggccgaggaaggagggacaactgctgggtccctaggcgaggctggtcaagttcccctggccggagcaaacaccggctgtcgaggatgacaggcagccctgctccaccctctcaggacatcagagaccaagtcacagggaacctgacccggacttgccttccccaaaccgctgcctgaactgagacccgggccgttttctctgctgatcctggacttggggctgtctccctccgcctgggagggtgcgggcggggggggggaggcaaagcactttgcagtactagtgtgttttgtgaatgtgggcacgcgtgcgcgcctggggccaaaactcagcagtttccagtactggaatcaaatagtggagaccactactgtcgtcccctcacaccccgcagcgtgcgagtgtgtgtgtgtgtgtgtgtgtgtgtgtgtgtgtgtgtgtgtgtgtgtgtgtgtgtgtgttggggtggggttggaagggcttcgtgcccgcagtcactcagtcctgcgctcatcctgttagcaagcacccaggtgtctctgtaggctccgggacccgcacccttgcatccatccatcggaggaactctgagcttgcttgcacggctgcagcccggaagccttctaagtgtgcaggcctgagaatctgcagccctccggcggacggcatgctaagctcggagcgggacggcggagggcagggccttgcgcatcgcgggcgggcgggcgggcgggcagcctctcctggcgccaacagagccgcccggcagtccgagccccagacgcccgcagcgcgccggggaggcggcggcggggcccggaaggcggtgggaaagccgaatcgcctccgctatgcccagcgccaccctcccaagtcagccttccccctctgcgctgtgttcggaccccggaacacccgaaggagccccagcccagatggagcggaaagagggttcagaggcgagggccaggaaggagccgccacgcttacctgcaatttgctcagactcccaggtcccgtgcaggcgacatgccccgtggactcggggcttgggcagaccaggtggtttaaagtagaaaacgcccccgaaggatttccgcaacaacttatggaagacgaaaaaatttgggtacaaagaggctgaatgcaccggtgcaggggccaggcgatcgggggtgggggtggggggcggcaacgccaggccgaccctgggcagctccttgcttggtaggagacactaccgctgtcagcgtctgctcccggctacttcagtgtttgttcaatgtaagattaaaaaaaaaaaaaagttgggggttgggggaggaggcagaaaggcgggggcttgggggaggaaggcaggaaggaagttgtgagcctgtctggggttgaactcagcggaacaagtttttcttttcttctttttttttctattgcttggcaagaccgagggagggaaacactttttttttttttaaagtttccattgttagctaacaaaaaagaaaaaaaaagaggcttttaacttctgcgggtttaagatacaccatttattttccacccctcgaccaaggtttgctggtgtctagttttatgaagctacttttgaaaactgtttttaataaagttttgaatgttttgctaaacaaagccgctagtgggggatctgttagcatttaaaacgggctaaaattctgcataaacagcttgtgtgcttgtacacaataggcaaattttaaaagctatattgtagggcatttccctgcacaattgcaaattttaaatgcgtttgttagggtagcattttggaaggccggctgggctaggagctgctgaagggtgtgcatgcagggtgattgcttggtgttgtgcatttatctatgactgcacacagcaactgtgccattcccatatttttgcactcaatccttaaagttattttaagaaaaagcatagtcctgagctcaggcctgatcaaggtctgaaaacacttgctcagtttcctgtgaacttactctcctgtgctttcaagcattcaactggatcctcaaaaaatggggggccatcaggcaacattacaaggcaggggaacccccccacacacacacacactcttaagcctgggcactgccagtgtgttttgcataattccctaaatcttaaccctagcatttagtggaaatggggaaacacagctgtgaggcttaggaggtttaagaatcccaagcttgaatccacccttatatcctgattagccaaaattcagatggaaactctggctttgcctgtagcaaacagacggctcacttgtttatgtaacaataccgttgaagtgagcaaagcaacctgctgcttggtcaggaaaagactcaagcaaatccgaaaccaagagctcttcaagccaagaattcctggaatcagacacatcctttctgaattaaaaaaaaaaatgcaaaacacacacacacaaaatgccacgaagggactgaatctcccaccctccgtggggctgaataaaaagagcccagtgtttgttcaagtgctaactcaggctctaggtggttcctcaaagaagccacctctgtgctccttgtttggtccctagtggcaagaagaggagttgcccagaagactcatgccctaaaatctaatctgagaggtgatctccctaggggatgccaagagccatgacaagtgtcacagtggaagccacagaagagcctagcaaagcgcacacaaagcataggaagtaaccttcccagcccgggagaagctgtccacagctgctaccatctcacacaggtggttcagtcagccttccctagctgagaaatgaaggcttcctgagaaatcctctaccaatcagcagctgtcaaatatgcagacaggacttctggcttggatgcaaggaagttccaccaggcgataatccaaactgtgacattgagtaggtttggttgggtgaaagttccaaatttggaaatcaatgtggtagtctttacgtcctaccgtagaatccagctggtttccacaatttaaaacaatgtaacatgtagtagttgctatttgccagacactgttttaaacacatcaggaattattcaggactagggatgcaatatgggtgatagaatgccttgctggcatgcacagtgttctgtgtttgatcctcagcaccacataaaacaggcatgttggcctagtgacagatacctacaatcccagcactccagatgcggaagcaggagggtaggaagttcagagtcagtcccctggggtggtgcacacctttaatcctagcacttgggagacagaggcaggtgaggccaacctggtctacagaacaagttccaggacagtcaggactacatagcatagagagtttgaagccagcttgggctacctgagatcatgtctcagcaacccctccctgcccctaacacatataaaagaaaaacacaatttacatattttcaaccttttaacaaccctgtcaggtaggcgatgttacaagcctcatttacacaagaaattagagccaagacatttgaaaacttctgataccacctccaataccaaagctggtaaggctccatcagtgccagtgcagactggtcacagaatccatgcttgttgctacttcttacaccagtcacttacaactagctaccacctaacttttcagaggccccatttgctcacttttgggatagaattttaaagatcaacactctgaacttaatatgtaaaaaaaaagggcagctgaaaaaaatccttagctcacatcatactcaacgatgaaggactggggcgatgcgctctacaatcatgagaaggttagggtgtctgcttttactacctttcaacattgtacttaaaaagctgaatgaggtagcgagtgcctataatcccaacactccagcttcattgcaaatacattgcaaattcaacaacagtttgagctatgtgagaacctgctgtggaataatccctttgtacactgtgtaaatataggtctctgggattggtttaataaagaagacagcctgccaatagctgaacagagtaagcttaggcaggagatgttaggattcaggcatctgtactggcctgcctttggagttctgacaggatacgcccctctcagttagtgctactaagagcaccacctgagcctattcactatgttcccttttaaaaagggccctgcccacctcccatctctccctccccctctcccccctccccctctcccttcccctctcccccctccccctctccccctctccctctctccacttctttcctctctccaatgctcctgtccccagaggctggtctccctcctccccccccttttttaacaatccctttcccccccccaaaaaaaaatccctctatttgaactctgtcgaatggtgtctttctctctcaagccacttaaaaaaaaaattacaacaggagagccagactaggagaatactggaagaagggcagagtctggagtcaccagccaaatgcagagggagcaggagatgattgtggcatgctaattaaggtactgccatgtgtcatgatgtaaataagaaatacaggttaacgtaaaatgtaagagctagttagtaataagcctaagctattggcctagcttttgtaattaagtctctgagtgattatttgagagcagttgcaggatagaaacttccacctacaagaacctgtctcaaaaaacaaaacctttgtacttgatgtcctagtcagtgtagtcacacaagaaaaagtaacaaaaggcatttaagccaaaagaagtaaaattattattttttaaagactctatgcatgtctgcagataaaaacctagtagaatttatcagaagctacttgaaatataaatattttagaaaatgtgtctctatttctattattactaagaaagccacaacctggttagtttaaacagaaatatattttctcatagttctcaaggctagaagtatgagattaaggtattagcagggttggttcttcagaggcctctctccctggatcacgtgatcttcctgtgtgtgtgccaatgtggtcatgtcttcttcttctaaggacccctggattagaacccaccatacctagttcaaccctaattgccatttaaaagatcatatttccaattgaaatctcattctgagacactggggttgggacttgaccatgtaattagttactccataacagcaaggttatgaaagacataagatgaataaaatatactttgccaactgtatgcctttcagaaatgctagaatgcttaaataataatgctctgtaataatgtcaaggactatgaaatacttagggataaacacaacaaaacacatataagacctgggggggcacaaaatactgctgagaaaaaaataagacctagataaatggaaagataccatgttcatagattagaggactcaataatcttgaagccagttcttctcaaatgtatctataagatataatgcaagtacaatatctcagtagatttttgttttgtctttattttataagtatcttctaaacaagggtttagaagacaaatcagctttgacaaagaagaaaagagaataactaacatcaccttctgtcaagagtgactataaaactcagagctggagcggtggctcagggattaagagcactggctgctcttccagaggatccaggttcaattcccctcgcccacatggcagctcacaactgtctgtaattcagtcccaaggtattctggcctccacaggcactgaatgcatacacgcacacacacacacacacacacacacacacacacacacacacacacacacatacacacacacactaaaagcacccatacactggacactgctcatggaggaagaagaataaaatgaaaaggaaatatttttacatataaaaacaagacttttataagaacacatagtgggcctaggatgctgctcagttggtaaaggcttgcctgggtgccagccctagcgccacgtcagctatgtgtggtagcatgtggctgtaatcccagtgtactggacatggaggagcaggattggaaattcaaggtcacactctactacatagcaagttcaaggccagcctcttacacatgaggccctatctcaaaaagaaaaacagaaaaatctctgagactttggggtaaattaatctgtggtgtgtgtgctgtgtgtgtgctgtgtgtgtgtgtgtgtgtgtgtgtgtgtgtgtgtgtgtgctgtgtgtgtgtgtatagtatgtacatgtccttgtggatgtgtgcatgtacacgtgtgcatgtagaggtcaaaggtcaatatagtccactttatttttttccagacatgttctctcactaaactggtatggctagactggctagccagtgagttccagggatctacctaactccataacccctacctccagtactgggattacaggtccatgccaccactcctggtttttgtgtgaatattggggatctgaattcaggtccttaggctagcttgtgtggcaagcacctcgacaactaagccatctccccagtccaaacaaatgcttcttagctacatacaaatcaattgtactacaccagaatataaaagttcaaaacacacagaagccggcaatggtgctgcatagttatcatcccggcactcagaaagaagaggtaagagagtctcgagttcaaggccagccgtgggctacatagcaagccactatgcacacacaaaaagaacaatgactttttaagtgttactgaaaaaaaaaaaactgaaaagtgtctggggaatataattcagtgtaagagtacttgcttagcacctgaaagggtctgggatcactctccaagactagaaaatatatatatatatatatatatatatatatatatatatatatacaaaaatatgcttagcagctttatttgaattgaggggaaaacccatactctccatatgcgaatgggtaagtgctggatgacgctggctatacactgcacactgctcatggaggaaaaagaatggactcttgaccatcacaacatggggcaaactctaaagaactaagacaagtgaaggaaatcagactaaagagatcattccctctgtggttttattgatagaaaatccttcttaaaaactcacaaactatagcagcagaaagcagataggaaattgttgggggaaatatctgtctgtggtaggagggaactgggaaagaaaaagacacagggacattttttaaagtgatgagcacttcactatctgtttttatttttcaagccaaggcttctctgtaacagtcctggctgtcctggaactcactctgtagaccaggttggcctcgaactcagagatctgcctgcctgtgcctccctgagtgctaggattaaaggtgtgtgctaccagggcctggaccacacttcaccacctttacaaaaatatttacttctatttttatatgtatgtactgtgtgaatgtatgccacatgtgtgtgggtacataggaaggccagaagaaagtgtcagataccctaccgctggagtgacacttggtggtgagccccctgacacagatgctgggacccatgtcctctggaagagtagagagcaactttagttgccaagccatctcctcaaactcatgtccactctcctggttatagagatgacttcatgaggatctacacatgtgaaaacttaccaaatggaaaatgaacaataaattcattctatttagtgaattagtttaatgttctttaatgaattaaacattaatttaatgattaagttgttaaatgtgaacagcttacttaatatcaatcataacaagatacccttttttaaaaaaaaaaactaggcatagtggcacatacctatcatcctggcactcaggagactgagtcaggaagaacggattcaagaccagctggagcaatatagcaagataaaaaacaaccagctaaaaatctcatagagcaagctgggtagtggcagcgtatatatgactttgatccctgtacttaggaggcaaaggcaggcagatctgtaaattggagaccagcctggtctacagagcaagttccaggacagccagggctgttacatggagaaaccctgactcaaaaaacaaacaaaaccctcatagagccaggtggtgtcgcacgcctttaatctcagcactcgggaggcaaaggcaggtggatatctgtgagtttgagaccagcctggtctataagagctagttccaggacagcttccaaagccacagagaaatcctgcctcgaacccccaccccccccaaaaaaaaaacccaaacaaaaaccctcatagggctatgggaagatacagcttttgaagagggtgctattggccccacacctgacattcttatttaccttcttggtaaaatgtcatgttagtgtgctttgtgttgctgtgataaaacactgacccaaagcacttgaaggaggaaagtatttattttgcttacaagttaacagttcatcatccaggaagccaaggcaggaactcagattactggcttactctcaagctcccagtctactacctttcttacacagagcaggcccaccagtctagagatggtaccgcccatagtgggctgggtcctcccacattgattagcaatcaagaaaatgcctcacatacatgcccacaggcctttctgatagaggcaaaggttttcttccaagtgtttgatcaagttgacaatcaaggttagccatcacaaatgttgagccatttattgacctattcacagtgtattccatggattagcaccaagtcactattccactttgtatatgttgtaattttaaaaagcagagagagaaagatgggaggtaggcagggcccttttaaaagggaacatagtgaatatgcacaggtggtgttcttattggttgcagctgagggcgaatcctgtcagaaccccaaggacaggccagtacagatgtctgaatactgacagtgtgtaagcctgttaaactatttgtggtactatatagtaataggtgatgtccccatattcgtcctccacagggtcttttcaaaggctaggacactggtttaattaccttcccacccttagaggtttagttccacactgtctagactgacacatgctggttgaattgagagacttaagaaccgaatcaggccagcagtggctatgcaaaagaagcaaggaaccattgcaccaggaaaggagctggctcccaggagaacaggaaaaatgttccactatggagcttggctggggcaaaggtctcctcagtctttcctttgctccacactcatcgctttccaaaaccccatgggcccccggcatgactgaagccaagctttgtccctaagagaggtcacccatcttctcccaggcctagaccagtaaagcattgtcttggtcctgcccccaggtcccttctcttgttttgactcgccccttgatctggtgattgcaagaaagcggtcatttgggtgacactgttgagtgtgaactgtgtcaggcccatggctattacaaggacaagctgtgacggtgatggggcagtctctgtcctccagcctaatggggacgccagcacatccagaacctccctgtcccatttttcagctagcgtggagcaggtagaaggggtcatagcttacacacaggataccatggcctcttctatttggtctagctgtgtatccctgagcaagtcattagaattcagtgttaggtctgtcaaatggaacacattaaaactctgcttcagggcactcttatgaggagccgttagataagttagggcatgttaaacactccaaagtttatgctttcttaagaagtcacccctcaaccctctatcacctagctccagaaaaagacttaagaggtattgctagtccaaaacctgcctattgcgcagcaagcattcagttcgaggttgcttccaggatggacttctggtgctcataagaactcatacacaggctgccactgctttactgccaggtagtcagcactaattgagggaggtcaccttcaagccattcctctctgttctatcttcagaaactccaaagtgtaacaacccccacacagttaggcacatatgcaggcacaaggcttacatcatagatgctggtccacagcccacagccctgccacgagaatctgtgggccaggctccttgcctggagatgctcggcatcaaggtaccatcctgagcccatggtgaaccagtgtctcgcctacagactggctggggctccggcatgaacacacaagaagtacagctggattctactagtgagacttcacaatctttgtcatacagacggagtgagggaaactcggggcccatgaggcctgagtgagagctctaagggagaggggccaagaatgaacaaagttatgaatgattggcctagcttagactcatttctggctagtcctttaacttaactggtttctatttaccttttgccttggggctttttattttttctttccttctatgtatctttttaaaaattatttaaattaaaaacaatcttattttacataccaagcccagttccctctcccgcctgtccgcccactcctgccaccatctctccatccctccctcatatccaatcctcagagacagtgaggcctcccgtgggggatcatcaaagtctgtcttgtcatttggagcaggaccaaggccctcccccctgtatctaggctgagagagtatccctccattgggaatgggctccaaaaagccagttcatgcactagggataaatactggttccattgccagtggttctatagactgcccaagccccccaactgacacccatccatgttcagggggcctggtttggtcctatattggttccctagctgtcagtctggagtccatgagctcccacttgctcaggtcagctgcttctgtgggtttccccagcatggtcttgacccttttgctcatcactcctctttttctacaactggattccaggagttcagctcagcgcttatctgtgaatctctgcttctgcttccatcagctgctggatgaaggctctatgatggcatttaaggtagtcatcagtctcattataggggaagggaatttaaagtagcttctccactattgcttcgatttttagttgggttcatccttgtggattcctgggaatttccctcttgccaggtttattgttaagcccataatggctcccctagcaaggtatctctttccttgctctccttctctgtccttctcccaactcgaccttcctgttccctcatgtttttctccccctccccttcaccctcctctttctcctacctccctctcccctccccccatgctcccaatttactcaggagatcttagggtcctccttgtttcctagcttctctggggtttgggattgtaggctggttatcccttgctctatatctaatacccacttatgagtgagtacataccatgtttttctttctgtgtctaggttacctcactcaggatggtttcttcttgttcagtccatttgcctctcttggtgggggcggggacaaggctccgatggaggtagctgcagtgctggatctccttttgtatcttactttcactgcgtctcatggttggctggcagctgtctggcttcttgccccagggcgtgtccccttctttttcctctttctcctcattctcttctctccttttcttgttcttttctcctctcctgaacctagatttctcctattattttctctgcctaccagttcctcctatcctttgtctgttcagctctgtattagaccaatcaggtgtcttaggcaggcaaggttaaacaactgcaacacatcttcacataattaaacaaatgcttcataaacaaaggtaacacacctttacacagttaagtaatattctgcagcatgaacaaaagtaacacacctttacacaattaaaatactactctgtgggataaacaaaagttacacacctatacacagttaaagtaatattcttcagcataaacaaaggcaccatatctttgccagttaaaatagtattccatagaggagaacagaatacagaacagatgtgctgagtggaaaaaacctgcctggtgcaaaccatggagagagaaaaacagtcaccccacgaactggtggcatcacagatcctggacctgtgaggcctcacataggtctgcatccatccttagatacatgagttcagggattcagcacctacttgtgctggctgaaaacagctctgttccttccaatccaaggagaattcttacaagaagggtctactttggcctccatgtacacatgtatacacacacacacacacaggcacacacacacacaggcacagacacagaaaaacactgatttaaacacacatgctatgatgcccacacagtcttgctgccctttgctgctgtcgtcaggtgacagaatgcaggagagcaaatgcaaacagcaaatgttatgatccaagattgacatgaggaagagaacattgacttcccctgccctgcccccattcctagttagatgccattctgagcacaccctgcattataatagctcactcattctttattcatccactcattcaatatttactaaacacacccctggcattctgcagccctttgtctcctcctttttgatgcctatgccatttgcatctgcaatacctttgatagagaaggtactccagtacctgctgaaggaccaatgtctgccttgccaactaaagggccatagcagatgggtttcctatgagctccctcttcaaagggaattttatggttgcattgttagcttcccttcactgtgacaaaatacctaagttaatcaacctataaaaaggaatgtttgtttggttcaaggtttcagtccatggtctcctggccccgtggctcggagcctaatgtggcgtagctcatcgtgacagataacatgggtttgagagaggctgctcactcataatagccagggagcaaaggagtaaggagggggctagggtcccaaggacccaacttcttcagactccacccccccaaaggttcaactgtgtcccagtaacagcagctggtacccaagtgtgacagttacttttgactgtggacttgacacgatgtagagtgacctgggaaaggagcctcaagggttggggggatctatggcactgggaagagaaacacaagcccattggaaatgtttttgcagtgaggcccaaggtgattctagaaatgctccatttccatgtagacattgacagttttctcgtttccagctgactttctcaaacagctgaacaacagattacataggtgggttgcctcgtggtaagttaggcacagagatctaaaacctggggacagccattcttgagtcagtggtaatatatattacttcttcactgtctacaaaacagctatgaagagatggatggactgagacactgagatcccactctgtagatctaaaaggaaacttgtaatcacggctggaaggtagagtcaggactgcactgtgggcctggggacatagcacagcccgttgggtgctcatctcacaggcctgaggatgccaatttgatcccagaactctgtaaaacaaaactgagagacacaatggttctcacttgtcatcccagcactgggaaggcagggacaggcagatcttccaggcttgttggctagccagcataactgactttgtgaactccaggccagagagagactttctccttctcaaaacaaacagataaaaaaaaaaaacggtggaaagcacctgagaaatccaagattgtcccttgacttccatagctatacacacacacacacacagagacagacagacagacagacacacacacacacacagagacagacacacacacagagagacagagagacagacagacacacagagacagacacacacacatacacacacacagacagagacagagagacagagtatattttagttaaatccacgtcatctggagttatgcacagatcctgacccctcgaacttacactatgcctttctcacagggacaaggcctaacaaaaacagcctaagagaagaaagatctgcctgggatctgctgcggagcattcagtctgtcataggtcatagtgaggcgtggtggaacagcccggctcaggagcctgtggccaaggctgttcttatgtcagacctgaaagcaaacaggtcaggctagggtaactgctgccccattcccccagtaacatgcttctcccagcaagtgccaacttctccaaggatccccggcttccctccatatcagcaccagcgagggaacacagattcaagacacgaacctatggaagacattttaggttaaaaccataattgggtctgtgactgaaagaattgtctttgttttgttgttttgtttttgcagggtgggggtgggggtagggagggcagctagggatcaaacccagtacattgtacacacaagataggctttcttccactgatctctcccattccttgtgtactggccagctttatgtcaacttgacacaggctacgagtcatcagagaggagggagcctcaattaaaaaaaaaaaaaaaaaaaaacaatgcctctataagaccaggctgtaaaccaggcagtggtggcgcacgcctttagtcccagcacacgggaggcagaggcaggcggatctctgtgagttcgagaccagcctggtctacaagagttagttccaggacagcctccaaagccacagagaaaccctgtctcaaaaaacaaaaacaaacaaaaaaatcaggctgtaggcaagcctgtagggaattttcttaatcagtgattatgggggagggcccaggctattgtgggtgtgctggtgctggtttctttaagaaagcaggctgagcagacatgaggagcaagccagtaagcagttctcctccatggactctgcatcagctcctgcctccagtttcctggcctgtttgagttcctgtcctgacttccttcaatgatgaacagtgatgtggaagtgtaagccgaataaaccctttccttccaaagttgctttggtcatggtgtctcatcacagcggcagaaaccctaagacgcctgtcattgacagagatcttaaatgatggtggtgtgaggaacaggcttggcgcctttctctgcacagctgtacttgagtgacatctgagaaccctgggggacaaaaatggtgaggacaagatcctgagtgtgtgatttcttttttttttgttttgttttgttttttgagacagggtttctctgtgtagcttttggagcctatcctggaactcattctggagaccaggctggcctcgaactcacagagatctgcctgcctctgcctcccgagtgctgggattaaaggcgtgcgccaccacggcccggcgagtgtgtgatttctgctcagcattttccttgaggttttgatacagtgggcctgatttttgaaggagctccagcaggaaggggaaaggaaagcagtttctgtcatttcagggttttgaggcaggctttcatgttctccaagatggctgccagtcttcaactccagatcctcctggcttctgcctcccaagtgttggggttaggggtgggtgccacttcacccaagtcctttacggctttaggaataggaagggggtggttaaggacagaactttgaagtatgtcaccttgcaacactctaacacaatacagaagctatctgacagaaagaggaagttttttatgctgccatttctcctttcccttacggtgaaggaaggcagagattatatctctgttgcttgcaagctgtcctccagcaaggctgcaggtgcccatagggtttccaccaacacagccgcagtagcttttccccaatatatggatgtcttatttttagctcaggacattattattaatgccgttcatttatccatcaaaccatgactggattttccaggcagtaaacaaagaaaagggaaggcaacgaagagggatggcatttgtcctcagagaactcacagactcaaaagggagctgagcttataaaggattatcactcaatgtgctatgtggtctcatagctgtctaagtgccagggagtcacaggtgtgggctgaccgcggctaagcatcaggcgagggaagtgtttcacagggccataaaggttgagtagatacttgacaacaaaggaagtctaagcaagggcgcatttcatgcaagggtgttgacacaggaagagcagatctgcgaagcaggaatttaggactcgaggggctcagaaggtaggagagcatacaaagacattctcctgcatgaggggaagttcatggattactatgtgttctcgtttgctttttgttgctatgacaaacaccacaaccaaagccagctgggcttgacttctatatagatgtcctcctcctcgtcttctcctcttctcctcttgctcctcctcatcctctccttcctctccctttccttctcctcctcttactcctcctattcatcaggatctcactcactatgtagcccagaactcacagaaatccacctgcctctgcctttatccagtactgaggtgaacttattacctactcagatctctttcctcagccatcaggagaggtcttgggttgctgttgaagggatctattctgtgtccggtttagtggcataggcctggaatcccagagcttacacgaggaaagcaggagagagagctgtgattgggagactccatttgggttatcagaacctgtgtgtgtgtgtgtgtgtgtgtgtgagagagagagaggggggggggaggggaagggagggaggaatgtagggagagcaaagtaaactttaatgtatctactttgtgcgctatggtatgctaagctaaaagatgtatgagagagccaaggaggatgggcagggaggagctcctcccagcatggcctctctgctgctgagaggtcacgtgctcctgcttaggaagaactcagaagatggagcctgatgctggtgcccttccttctcctggtccagggccagggtactttttgcaagatcccaggaaagcaccctgaagatgcagctttagaacagcgttccctccaggaacacccaggctatgtttaaagctcccttcctgcctaaatcctttcatcactgggggatggggggaaggggtgatattaccacaaagccatgctgctcatgtctcatggagaatagaaacccatcccaaggatacctggacacccacgctgaccttagaaacaaacatttcttccattgaaagcagaccaacaatcagcgtaggatgaatggaccattcatgacagatggtaaggagagggaggctaggaggccttttcttcagggacccttcctgtgtcagcagccaccagatggctccatgatgtggatgctggagtagatcatagcagagccctcctttaggcaaaatcaagaaaactgtagttctcacttggaagtcaaggcaggaagataaagagttaagattaaccttggctacattgcaaatacaagggtatcctgggctacatgacagcttgtgtcagaaagaaagaaaagaagtggggaaggaagaaaaagggaactaattctaggcagagagcaatttaaactaatactccataccaaaatgaagataaggaagaaaagagattttgttccattttaagcaatttatttgcaactcaattccaagtcttacagtaagtagtcataattgcattggtagttatttaaatgtgtacaagatgccgggtgctgttctcaacactttatgtcatgtattaagcatttagttataatgctaaaccaagagttaggcgatattatcactctccattttataggccatgaactgtaaacatgaaaaggttaagtaagctagactggatgattacagggactgggtgcatcttcgtgataaaaagtttgcctagagggcctaatgctgtgtgttccatccacagcagagtaaaacatatacacataaataaattaataagaagtgaagtgaagtttggcctgctgttaaaaaataaaaaccaataatcattaaatagtcatctaaacactcaccataaaagggcattagaagagatgatcgctgaagccagacagccataaaggtctgtgcatccttcaggccagcaaagagaagtctgattcttgatttagaaaaggagagccttctttcacatagacagagccagttcccctaactgggatagaaatgtcagcagaatgctatagaccagtgaacagatgctggtagcccccaaatgatcctacccacccgtctacaccccaacacccacccatccagccatctttttctacacaaggactcaccttcctactgtggctgacttactcatggcaaattaagatgttataggacagcaatgtcttggccttaagagtcaggtatctcaggttgtaaatcctggcaactgcataatttggggcaaaggtttttaacttctcggagatttaattctgaatcttggagtagtttcataactggaacgcaaggttcaccaactccttatcccacctttaaaggaaaagtattttcaaggcatcctagcactaacaatctcacttttattataatattctcatggctatcctagcactaacaaagtcacttttattataatattcagggccatcctagcattaacaaactcacttctattataaagtttcttaaatatatacaagcaaaattctaaataaattctgtactgtgagaagtcttctgcaagtaaaaaacaaaattaatggtaaaagaagacccccccactgcctcccactcccacagacaaataaatactctcaacccctttttaattggcaggtagtccaagagacatttttacaccatcactcagcatttcctatcaagtctctgtggagacagacacaaggccagaaacgaaggcttggggctaaggtatagcttagtgggagaagtcccatctatcatgcatgagaccctggactccatctctagggaaggaaggagggagggcggggaaatctcaaatgtccatcacaggttcgtgtttggatgactggtcctccgctgatggtaccttctgggaggttcttgaggctttttggagggagggtctagctggaggaaatgggtcattagatggtgacgctgggtccagattcctctctatctctgctcccggtctgccttgacataaacacattgcagcagacatgctgctatcataatctgagctgtgtcccacatcttcctccaccacaactgaaaccctgagtcaaagtaaggctctcctcttatgttgtttctgtcggatgctgacacaacacaaaagtgacaagtattaagtggcatgcgccgggcggtggtggcgcacgcctttagtcccagcagagggaggcagaggcaggcaggtctctgtgatttcgaggccagcctggtctacaaagctacacagagaaaccctgtctcgaaaaaaacaaacaaaaacaaaagtgtgatgcactcctatagtgtctcgccattctactctaactcattctttcctcaaaggctgctccaatcctccgatcttgccaccttctggcctcagcctgggaaatgtgatatgctgaaagcaagcacattgccttggtagtctctagtcccaacagaggcaaatgctaaagtttattgaaaagaagggatgaatattattgggtaatattatttcagtgttttgaacgggtgagaacggtcaggctcagagcgattaactgacatgcagctatggagacttgtttgattggcctggaattaaagcccgtgttcacaccactcctcgagggttgtgggtagagttcacaggaagtagaacttgaaaacaaggacttctgagaaatacgagagggggcagatgaaacaagagaagggcgtgaggatgcagtcttagtggagacaagccggaggccagggctatctggagcgtgaacttctctccctgtttacccggcctggttctctgttgtagaagccacggtagcttggccaatcagcttccagggattctccagtccctgcctcttaacttgctattggagcacgacggggattacagacctgtgcgctaacccacgggctaatcgtgggttctagggactcaaacaccaaagtgcggcaggcgctttaccccccaaccatctccccagcctcttggagttagattctcctgcccctgaacatttcagggaagagagaattacctccagggcaaagtcgtccccatttagctgggagcccttctctgaagaggggtaggcacaaaacattagcagccagtatcgcagccactgggagatgaggtcacctacctcttgaagggatctgagccgggaggacatacggagactccactcgttcacatgacataccccaccacggacagacatatttactcggtgtcaaaatgaaaatgatagtatgtacctcaggggccattaggaagagtgaatgagatgctgagggtgagtgagatagggctgtgcccagcacactgtaagcaaacaataataatttaaaaaaagattagctatagtaacattagtgtttatttaacaatagacagccacttctgtcattaataattgcaattgtatgcttgtgaccattggcaatgggccttactttgaaatctctgctagttaattgaagaaaggaaactcataaaacacagactgccccatggagacaaccttttctgcctcagacttgcctgtcaatttagtcattaaattgacaagtcccttgaggtccaagtccactccatgccggcttgttttcctcactattcaacccagagatgtgggcactacagcggccccacaacgagactgaacttagcctcggaatggaatcatcactcaaacgagcacgtgggaggaggggcagggcaggagctcctgggccgcttccccggatcgggatctctgttccagcccagacagctgactagattgatttccaggtcacggtttgtgctgaagtcactgtttccaagctctgagtcaccgcccaaggtaaaccttcgcaggctttcccccagcccttccgtctgacactcacaccggagcatgtctgcgccccaccccgctgtgccccgctagttggggcatgaatgtacctgggtcctgctgggcttttgaacctcaaatgactcatgctgtgcacttgggtggatgcaaaaagagccataccattcccttggctaaaggcagctgctgctgtactttaaaaggcactgtgtgtagatcttgattttccttttgcaccccggaaacgctcgatgagagctgagatgctgggacatggaagaaaccaagttggtgacagatgtgatatgcatctgcattgcttttcttattcctagagacgtgttttctggaacttggagttgaatggaatcagactctgtgtctgctctctccccagccttaaatacaggtggttttgcttttttttttttttttttttttttttttttttttttttttttttttttgagtgtttcccactgtgactgaaaagtcatagaaacagctattgtggagaaaagggctaaaatgggggaagtgaataactgggtgattttggccaaagtgaaggctccagggcaacaagctaaatttggtcaacaatgtgaaggttctgcctccccacaggaactgtgtgtgctatccaagccagaggcctgactcctgacacagctccagagtcacggcacacagagccctgctgctctgccctccagccttgcctgcctcaccattctcagaaaaccaaaggaggaaaattgagcataagaggaagtgagattcgaacaattacgagtgggtaaagttgcccaaacatgagcaaaattgaaaagataaagcataggaaacacgaaaccagagcgtgaggagaaggggaatgaacgcaacatgccaagaaaaggttggggtggtgggagagggaatcagaactcaggcatcagatggtcacctctgcccttctcagtgctatacagcttcatagagcatgagcccatcaagaagaacaagaacccagagatagatggtgtggctagagttgaaagcaaggtgttccccataggcttgtgtgtttggattcctgattcctagactgtggtgctgtttgaggaggctgtggaaccctcaagaggtaggacctaggcggaggagtgagtccccaggagatgggctttggggctgtagtcggcccctcccttccagcctgggctccctacttcctgcctcacatcccaggctccgtctgctgtgctggccatgatggactgtctccctccaaccaaaaacacagagtaccatcattatagaattaaaatacaaattagatgcaagaagaaacaataccattggaagcaatgtgagcctcaaccttcaggagaagctgaagagaattagtgaccatagacagcaaaggcgtggataaggaaaggagaaatagctgattaatacaaggacaaccagatgccctatggcgaaggagcccagcatagggaataaaagatacattcaaaagcataatcagggctacggagatggctcagcagttaaagacacctgccaccaagcctgacaaccagagtgatccccaggacccacatggcagaaagacagaaccgactcctgtatttgtcctctgaccgctttgtgtgcatcatggcatgcatgtacgcacaaataagtataatttttaaagaatgttgtgaagtgtgattaagtgtatttccctgagatatgggactgaattagagaaatatattacgaaagcataagaaattgtaaaatgttaagtgctaaatgaaatatgttatagttcagagcaaaaattaatgcaagctttgataataaagagatcctttaaggtctggagtaatggctcagcagttaagagctcttcctgttcttccagaggacctgggttctcctccctgcctgcatggcaggtggctcacacccacctgtaattccagctccaggggatctgatgcctctgactcctacaggtacctgaactcctctgcccatacccacattcagacacaaatgcctagacttaattgaaatgaatggaaacaaatctttaaaacggaaattcttcaagcatcctaacagaaaaggcacacatatgaggggaaccagaacagacagggtccagctttcttcacagtcacatacaagaccaagcagagaccaggaacctggctacaggcatccaaccactcaaaaaaaacttggcattagcctgtcaagctaattatgtacacaccctacaacgccaccaattccagtcttgcaacacaaccagcagacaacataagaatgtgctggtgagacagcgtcacttcagaaaaataaaaaggaaaaagaatcacttgaagggctgagtgataggtacacaaggagacatggttaggattcatcaaactgagtcctccatggcagtggccatgagtactccagtctccagtgtcactggaaccaaggggaaacatcacatttagcgtggcagacaaacaaaccaaacaaaatatagcatgctagcacacccctatactcccagtacctggaaggttgaagcaggagaatcccatgtttgttaccagcctggcctatgaagtgagatgttgtctcaaaaaaggaaaataaacatgcccgctgcctaaagcctaagcgtattactcaaggggaagagcgtgcagaatcaatgaagggaagttaggatggtggttccagggcaaagtcagcagggagatagagtgagactggaactcagagaaggtcacagagcacccagcgctagttctcaagaaggggctggcttgcagtccacttagtatttgctttgttcatatatcccaggctgaccttgaactcctcttcctcctgcctccagctcccaagtgctggcattacaggcatgagcccctacacccagccatcttattatggcgactcatacatgtaagtctgcatgttcttttgctttataagaaatgaatggttctaaacatctctaaaatatttctgccactaggaaaataattaaggagacaacagagtatggtctataataaagacaaatgtgactttgataatgacaatcagacaagtctctctctccctctctctctctctctccctccctctctcacttgcagtcttgttcatgctaggcaagcactctgccacagagcgactgccccattagcagaaacagtctcaaattagaaactgctaagactctaaggcccatgagtcctcctcagaaaacaccgaagtcaataaataccctgctcattacaaaaccttaccttataggagagtcaatcaaagaaagtaatcaaggagtaactcaaggatggagagagcacattataaaattttcagagaatgtgacattcatttttgtagagaattactctttcaaggagaaaggagtaactcaaggatggaaagagcacattataaaattttcagagaatgtggcattcatatttgtagagaattactctttcaagggggaagaatagaattatcatcacaacatatgtgatatgaatttaccccagtgtagcaataattgtccggtgaaaaccgggtggtgggatttctccatatccacctgtctgagcaactgataactacatgtaatttccaaatggacaaaataggtttgactcattttctaacaccctgacccttcagctcagggacagatggggcctggctggagaaggaagggagagatgtcaggtagaagggagccattggtgctcacttcacttttcttggggggtgactctacagtgtcaacttgaggtttagtatcaccatgaatcacctctgggtgtttccagaaagggagggaaagagcagggaagactcgccctggatggatctaggcaatgccaccccaccacctggggttcaagcctacatgtaaaggaaacagtcaggggagtgccagcgtccactgctcagcttcctggttgtgggtacaatgtgaccagccacctcaagctcctgctgccatgatctccccgtcgtgatgagccataccctcaaactgggctgagctagaccctgcctttggttcttctgtaaggtattgttatagcagtgaaaaaagcaaccaatatagcacttgaaagaggacatttattggaacttattttatatcagacatctttcaaaattctatatgaactacttcccctccccccctttttaagtagggtctcctgtagctcaggctagccttaaactcacatgcagcctaggctagccgtgaacacctaatcttcctgcctgtacctccctggtgctgggcttataggcacatatcaccatgaccagctggactggtttattcttcacagagacacaatgaagttgatagtgttctgctgtagtttggatctggaatacccacaaagacctgtgtcctcaaggcgcagtcccagttcttggcgcaactggggggctgtggaatctttaagaggaggggctaagtgggagacttttgtgtgattggaagttgacctaggaggagactgtgggacccctttcctctttctgtcacttccctgccatgaagtgtgcagttttgctccactgtgaccctcagctgttgttacctgactatcccacaaaaatctaagaggcatgggtgtgctgggtcataaactggagtgtctgaaactatacgcctctgtcttcataaactgactatttcaggtgtttgttccagtaacaaaggctaacacaatcctccacttaaacatgtatgggttgagctagtgaaaataagccgtagtttaaagcaatcgccagtagaactccattacagagctcaggggttgcccatcattccctgtcagagggagcttttgtgttgtgtgttcttccctgatggtaacagatctgaccacataacaagggtgggatgacctccactgaagcggctgaactagtgccagtgacaagccggaggcagagaacacccctgccaggcactccctgccaccccctcccataacatcataaaacgtctgggttcctccaggccagcaaacaaaggaatgactgcctttcagagtaagtaatcctgaattggatgtcttccaagacacacagaaggaatccctctggttgatgaatcgtcacagagttgcggagcaagagggacctgaaagaatcacctgagatggcctttgttcccaacaggaggaaacagaggccttggagatgaaagagacgttcaaggtcacaagcgagtgaatagctgatggtccaaggccaatatattgctgcaggtcacacctggatccctgctcgcatctgcttagcacaacttcctgttccagcttccaaaggtggggggtgcttgactctagcaggcgagcccgacatttgtctttaacttcttggttagaagccttggcttgtggtcaatcaaacgtaagagcttcagaatggacacgggctctcttttctaaaacggtccatgctcaaaatggtgacggtagagtgtggcaccgtggtttggataggttcccgttagagaggctctttgcatttcccccagattgggtagtaaagcattctgagagtgagttttgttcagcgagcaaatgacttgaccttatcagcttggcgacaccaggcagctatcagcctgccagccctgggactacagttagccctattactggagtgtttctcaccaaccagatggggctagacctggtcaggatatcagagtatctgtagcgctaagctgcagatgagctgggacacagtctcttagtgccctgtcctctattcccacagtgacaggcctgtagtgatgtgtatggcacctacagtggacgaggatgaagctctacgcattaagatgggttatagggggtgccgagtgtgatgggtcacctctataatacctgcacttgggaggctgaggctggagaatcctaagcttgaggccagctggaactgtacacaatgagttcagtctcaataggaactgtctcagcctcaccccattccccccaaaataatcagccaaacctttgttaaatagcttatgagaaatgtctctgtaactaagaaaacttcaatatgtagtgtaagagagtgacttttacatgactttgagtcaataaactatcaaagacttgaattttactcttaggggcccagctggtgttctgttgatggtcaccagtgtctgaatcagtaacagatgctcagggaagcaaggagaggaaaagatttttttaacatgctaaacttcatttatttatttacttgtgagagtgccagtggaggtcagagagcagtttacagtagtccactctcttcttctacctcgtggacaatactggggatcaaattcaagtgttcatcttggtgccaagggccttaacctgctgagccatctcactgggtcatgaacagatctttaaaagtgaggaagcaaatatatttaaatggcttcaaacattatgcaacctatacgtgctgagtttgttttgttttacattatttttgaggcagaatcttgctatgtgatcctggatgaccttgagctcactcactctgtaggccaggctggccttgaactcacagagatcctcctgcctctgcctctcaaatgcttggctgacaggaatgttcttccatactcagatttggaattttatatatgttttgaaatatttgggtagtaccccactggtgtgtacattttttacattttaccttccagttaaatattaattcaaacagatacaaatgtttgtttgtatcaaacagatacaaaggcattaataattcacattgtcacatccgtaaagctaatttttctgacttgactttagcaactttacctattatatgattatagtaaagatggtcacatgtttcccataacagtaataatctaagtaattaaatacccaaagctgcaatatgcaaagtacctaataatgcttttatagaacttataaagaaaatgctaaaatttagagtcatatttttttaaaaagtcatttcttctaacaaattcagtactcagttgctgtgttcagtaattgaacatgcaatctagcaaatactaaaggcatgactgccactgagctctgcttccagcccctagatttgcatggcaaaactaaaagctcaactatagaagttacatataattaaagaatgtgaacattttagatcaaaattgtctactttattgaagagatagttaaatcttattacatcttctaaaatatcaaattactggcaatttcagcatttcactcccaatagttaatatcatgtaaaaaaataagtattacacctcacacaggctacacccagacccatgcgccactggacttcattatgcagagacatagtggagaatgtggctgctcactgcactttctttgcaacctcagtgtatctgaggcagtgaaaaatgtgggctgccatcctcacccattcccagccggaaggaaactggctttcctgtcttagctccagccccacacagagtcctttcctctaaatataaatatatttagcaacatatttagtgacttgttttctcttgctctcctccttttccttattaaaatggtccacagctgaggccaatgtcaagaggtatttcctagagaaatgatgagcttttggtcaacttcattcagacctgggttatatgaggaaccaataacatatattttaaagatgactaagcagatccatacagttgatggaatgtggcctgtggttcacaggaagacccataccacacctaccactacccccggggaacaacggttcagtaatcactcctgcatggcctctggtggcttctatagaacctaactcctggaaagaatgagagcggctgtatatgagaacttaattgtaatatttcaagctacaacaaggttgcactgaggctgtgctggtgagggcctccgggatgccggtgggagtccagagagaagtgggaacagtggttcgttctgccactatctgctacatctgtgctaagtgggacttagtaagtacttgttttcacaccataatgggtctgaaactcagggccttctgcacgttaggcaagcactccagcacagagctatacccctaagccttttcttactttttgactttgagagacaatgtcactaaacccagactagccttgaactaactctgtggcccaggactctctggaaacttccatcttcctgtctcagtctccagagtagctgggatgacagccctgtgccaccaggctcagtttgggttttcttgttttaatctttgttcttccactgatcaaatcttgcaacactctaaataccttgtagtttccaatgctggcattgataccacatgcaaatttcatgataatcagattcagtcacttttcgttttgaaaacataaggaagagaagtggagaaacagttctctggggtctgaacactgttgtccgtggagtgaaggtttggggtcccagcgggggctcggaattctaaaggttgtgtggggagccagggactgttatggaggatgtctgtaaagtgccagggaggaggaggatggtggtagggagggcacgattagggaagaacaaagcaagaggctgtgagagcccagaaaggggcagaagtgaggtagtggcggatgagagtccttggaaagggacatgggctctctggtgacaggacagggaactgaagaaccaggctgagactagcccagagaagatgttagacttctctgggaacatctgtgaggtcaccctgcgcattcattaccgccacactgtcctctgacaccttcttaggatatttgtgggtctttccctttagatccaggttcttagaggcctctcgtagctctccctcctcccatccattgtcctgggactcctccagcagtatggctgccaaaggaatatatgttcactgctagacttcactgcagatggataccctcgttaacacacctgaatagtgaaggaaagcacgtgtcagtggtgtccctctgcctgctgactcctagaaaagatcgactgtgttcccaccaccttctagactccatatggagccccagggcctcaccagcttctgtgctcacagagaagcaccctagggggagaagcaaacaggcatttgaaaaactaaccaggtgctggtggtggtgtgcgccttcaatctctttgattctttctctttggctatcatgaggtgaacagggtacttcaattgctggatttttctgtaacattcttcctcacaaaaggcccaaagcaatgaggccaagagaccatgaactaaaatctttgaaaccatgagtctaaacaaacccttctttgttatggaataatcttgttgtacactgtgaagatgtgtctttgccaaggcaccttctgattggtttattaaaaggccaactgtccaatagctagacaggaagaggttaggtgggagagcgaaactgagaggatgctgggaagaagggcaaagtcacaaggagttgatggcaagctgcagaggaggcaggagatgaccatgccctgctgaaaagggtcccaccacgtggcagagcatggataagagatctgggttaatttaagatgtgagagctagctagcaacaagccctagctactggctgagcatttataattagtaataagtctctgtgtggttatttgggagcaggctggcagatgagagctgactggtgggacacagaagtcagccaacacgtcttcctctaaattgatcttctcacgtatacagaaagctgacaaacacagccaggctctgggaataaggccatggataccctggaggctggggataaggccatggataccctccaggctatacttctcagcctaccagactctaacgtccagctcttgatgcaaagtgattccagctccctctgcccttctaagcacagcccaggtatcttggttactagttttgggcttctcctagtctagaagcccatggttctcattgaccagcacatatacaacccacaggagctgtggagaaatgtcactgcctcttatctccaggggacagagcccaacagatagcaacctttctccttccctgtcccattctgtgtgggtcagagttctccaagggatgactgcaaatgagctcagtggacaggcaggcagaccttcaggaagatacagacttattatcaggggttagctcccataaccacaaaggctaagaagccctaagacctgaaatgaaccacctggagacctgggagaatagagcaggtaaattcaatcaagttgaagaagcagggtttgaggtctaccccaagactaagtccacaggcttgaagatggggtgggtggcaagttccttccctccccctttggaaaccatttgtctagctcagtggttctcagtctatgggttgcgacacctttggaggcaatatcctacatatcagatatttacattatgactcaaaacagtaattgcagttacaaagtagcagtgaaaataattttatggttgggggtcaacacagcataaagaactgtattaaagtgttgaagcattaggaaggttgagaatcactgggctagaggtagttggctttcagagacactttgatcaggctccaggcccattgtccatgttttctggggtttgccttcctcagagtatcagctccatttcagcgaggcaagttggctgctaactatatttcaggttcagatacagaggtctgacggaaggagaagatgctgcctgtatatttccaacaagatttctgagatccaactgggtcagatgaagtcacatatctgccctcatgggataattagtgtgtgtgtgtgtgtgtgtgtgtgtgtgtgtgtgtgtgtgtgtgtgtgtggtcaattatgattggagtagaacagaacctttaagtgggaccagtctcacagacactcctgggtgagtgagtgtgcccaagattcttggacaaaaaagtgagcattgttaagaagcttggttaggagggagcagtgggtggcgactctcctagtgtaagcatgaggaaagcaaagctcttggtatgatccaagagaactgaggagtaagcagctactagatcgtttaatttaattagtgccatctatccccattgtccccacagctcacccttcaactaagagtgtgtaaagcgagggctccccaagtggctgggacgtctcatttcgcatcagtgacaggacaggctcacatctgtgagtcggtttaacgtgaactgacctttcaaaaaactaggtgtcctggtagagtgtgaaatcagattacgaagcctcgtatgactgaatctaacccgtggtgtctgccaggtcagctgtgaccctgagggaccccttgctggctggccagccaccctccctctgggctccctctctgcactgctgtgttccactggctgtccccttcctctgtgctcttcatctggctttgcaagtgacaaaactgagcttcagaggggacagtcatgccctggggtagagagccagttgttgagccatccttatgtgagcacattccgggcctctctgtatgttagcaacgtcttcccggataaactaatccccaggagcccctacttgtcaatgaaagtgtcaatcaataagcatttgtgcttgggacacagggacaggggtaggcagcgtcaagtggctctacatcttcactttgttgagtcttttgtcccctcgctcccagcctccgggtgtccttatctcctccatgtgcccagtacaataagggagctatgaatcagcagagacatgtcctttaccaaagccaaataaggggctgagccctaaaaccagcaataaacccaacaaggttttattaattcaaacaaagtgtaatctgcagttggagggtgtctagggccacatgggcctgtatgactctcaaaggaaaaggaagggaaagctgggctgcccacctctgtttatagggaacaattgttctccaggtccaaaccacatgtccataatagggaagaagaacacagccctatcagggagtttttattcttagggccggaaaagagcaaaagctgtttctccggcctgcagtgtgtcagctttggacttcccattccccaactctccttagccccagacccacccccagcccccgagcttttggtcttggcttgcacaaaaacaaaacaaaacaaaaacatattcccatcttgacgatgttgagatgagccaccaccttcttagggatgaaatgaacaggtaactacaggggaacaaattcaaaatccccgctggctgggctgctgagctgctgaggtgaaatagagcagtcaggagccacctttgtgggacttcaaagtcctgaaggggctctcatctctagggttggtctttagagtcactggaactatagtttccactgcaaagagaatgcagagcagggagcctttgctggaacttgggcatgagtagaagtgttcttgttacattctcatttattttgtgccaaagcctctctgtggagcagaaggctgtgctgcctgttgccaccgtcaaacattcgctgcccatcccatgtccaccacggccaggaaagccaccttgaaggacacatgacccacaaagaagacatggtgatggttagtcaaatgctttgtagagtggcagtggactgagaacagtgagagcggagtttggggggtaaagaagtgcccactcccctccgcccaggctcattcctgtggacccccattttcagctgtttagcacagcccatctttccctgaggtcttgtgaatgacagctgtctaaaagaggtagggctagatcggtgatgtgtgcggggtgtttccagactcttccatcctcctgcccggagcatgtgccttctgatccgtggcatgcagaacaattctcctttctgaatctgtcagtagttgagactgttgactggctctgcagatctgatgtcacagaccgcatggcgggatacatgctgctcttaaaatggaagatggtacatgctctgacatggaatgatcttgaaaacatgctgtataaaagaggccagacgcaaagcaaaagccagaccttgttttgagagtatttacatgggatatttagagattaaatctgtcgaggcatagctcagatgggggtggtgagtgccagaggctgcagacacagggactagtaagattctgtttaatgggggaccaagtgctgctgtgaagtggtcaatacattcaagaactaggtatagctgatgttcgcacagcatcatgaactacgagacaccattgagtcactcactccaaagtggtcattttgggctgtgcatgtagatcaaggggagggcttgcttgcctgtgagcaagggcctgtgtttggtcctcaactccacagaatgacataacgcaaaaataaaataaaatgaaaataataattttgtgtgagatgaatttcacctcaattttttttctttaaaataaagctggggttaagagcactgactgctcttccagaggtcctgagttcaattcccagcaaccacatggtggctcacaaccatccgttatgagatctggtgccctgttctagtgtgcagatatacatggaagcagaatgttgtatacataataaaataaataagatattaaaatataaaataaaatcaatctgggatgctcaagatggtgtcccacgctatcgcctcgccagcaagaaccacacaggacattcggatccttctgcagtaaagctttaatgcatcttgagaggagagcataagcttaccagagcagagaccccgagccaagaatcccgtcccctaataaaggctggcagctgccgcctgggacgtgtcaccctatgattggctgcagctcctcaggccatatgacgccacggaataggcagagatcaaggaatggaaaattacccagcgcctgcgcaataatcttgtttacattcagtgcctgcaggcgccatcattgtaatggagaatgcagggacggctccctacatctccccctttttttattaattaatgataaggctttatatttttacaagcaaataggtcacccatatgttgagggatagaggcagaggttgtaccttcccaatcaaacattaagactgtgtacaagagtcgccatcaggctgttagcttgacccgaagcgctctcgacctgtcctctgccgtttttctgggaaagggagactagggcaggcaacccttatgcaggacaacatgcctcccagagaagcctgcatactgggcaactctctgtgcgatgccttgctcaacatccctcatgggctgctcaaaccagacactctaccctgtgcaatgagcctaggctccgggtgtgcaagagctgtctggccggcggcctattgcttaagcatagttagccaaatatcagtggaagccccttgttccaaagctacaagcgcttgggcgataaccaccttgtctcttagtttgagccctgagcctacagaccagccagagaagcaacatcaatccgcagcaaacggctgcaccaaacaatcccatccccacccattccttaaaataggagacagctgaagcgatccatgatgacaatccctccgtcaaggacaggagttaatctggataatagtggctctcaactcccggggagagggtggagttccgacttttgaaggtccgaaggggctcttcgtgtgagtctttccgggatccacaggggattctcttcatcctgtggaaaaacacatatagctcccctggatcttatgagaataggatccgggcctctccaaagaccagttaagatatctttccattttaccatttcctttggcctttcaggttctgaggtgtgacgcttggccgcagtatggcctcgagtgtcaatgtttatgaggctttccccaggcattccaggcctccaagaagtgttgaataacatgcatggccttttcccctatcaaagactgggaaagccatctgtaattttctccgctcctctaatggtaaaaaggagtcggtaccaaataatgggggtgctgatggaggtacacccgctggattaacaggcgatggcctcatatttgctttcacttttctatcagggtggtatctgtcttgctctagctctgtttcctcgctagagtctaaaatctcagagtctgagctgctcagctccaaggcctctagtttcaccgtagggtagaggctaggttttgagtctttatttctcttaaatttactggggtgtgaccggttattccctattttctctccccctttttttgtatcctggggagggcctttttccttagacatgtccttccttttttgagctcctaatctctcatctcgttcggtttctgatatattatcctgtacctctttaagcgttttttgactctctgctaccatgggacggcaagcctcaatctctagacagtttttaattaggtctctctgttttgaagagcccattatgctggaggctacctggggtaagcttggtcgtgaactggaacaccagccacggtgggcataatataagaccaatgtgaacaaaagaagaataaaaactagaattaaggcttttccatcccatagtggtgacaaattaaaaacaaagtcaaaaaagaaggtgtcagaataaagcatacctctccgaacttaccaccctgcagttctgaatccgccccgttagaggggtctccgcagtgctggcgatgtgaacaagttcccgggtttcagcaccagatgtcccgcgctatcgcctcgccagcaagaaccacacaggacattcggatccttctgcaggaaagctttaatgcatcttgagaggagagcataagcttaccagagcggagaccctgagccaagaatcccgtcccctaataaaggctggcagccgccgcctgggacgtgtcaccctatgattggctgcagctcctcaggccatatgacgccacggaataggcagagatcaaggaatggaaaattacccagcgcctgcgcaataatcttgtttacattcagtgcctgcaggcgccatcattgtaatggagaatgcagggacagctccctacaagatggcccagtgcataaattgcataaacttactcaatgcaagccgataacctgagttcaattcccaggaccgctgtgggaaagagatcagattcctgagggttgccatctgactttcatccctatgctgtctctctgtctgtcacacacacacaaggaatacaatgtgactagatagagataaagagaaccaattaaataatgtggtcgtaagtatcccctcaggtatggctgcccgaaagcccaccatgagtttttgggctcctacaccatctcactcttcctctcagggctggccaactccatgtaaagtactaactgctcttgtggtcatcatcacttctatccacataggactccaccaaggtcacccacaggtgcctgcctgcctcagcttccaagttcccaacaatgaaatacagataaatgtctgtacacatacatgtatgtatagtacacacacacacacacacacacacacacacacacacacacacacacacacacaccgcctcctacttttaagacagggtttctctgtgtaaccctgacggtcctgtaactcattctgtacaccaggctggttttgaactcacagagattacctgcctctgcctcccaagtgctgggattaaaactgtggttctcaaccttcctaatgttgcaatcctttaataaaattccacccataaaattatttttgctgccacttcacaaccataattttgctactgttatgaattgtaatgtaaatatctgtgttttgcttcagtcttaagtgactcctgtgagtcgttcaatctccaaaggggttgtgacctacaggctgaggaccactggattaaaggcatgcaccaccataaccaactttaaatacaggttttcaggactcaaaaacacagcacttgcatgtgtcactatgaagtcacacactgaaatgttgggatttttggattctggcattagtgataacaacttattttctttgtaaatgtttgcctggtattttaaaaccactccacaataaatgtaattttcatatgattttaattttggtgatggacccgaggcttcatgcatgcacaacacacatcctctcaccaagccctttaggtaaatctatttattttgtggttttgagacaaaatctcatgatgtagctctggtggccaggaactcactatgtaaaccggcaggccctgaacttttgacagacctccctcctcctgaatgctgaggttaaaaaaaaaaaaaaaaaatgtgagaccgtacacttggctttgtgtatataattctatttatctattcattatctatgaatctgtgaacagggcctgctgcatgtggtaacatgtaaatttatagaaatgggttaagtcaagttataagagctagttagaaagaagcctaagctatcaacaggaccggtcctttcaccaatcatagctaggggaggtgctggggtcaagccctggatgtgggcctgggtggtagctaagttggtcagcctgggccttccacaagaacccccacctcaggcgaagggcagggccagctccccagtgcccacaccaccaaggtcagccctgttgcacccatgaggggtggagcctgttctcccagggatgtcaactggccctaggacatcaacttggttttaagcagcagtccagaccacggacaccagtgtggcctttggtggtatcacaggccacagacccagacatggctcccagccacagctcaggcctgaacatcaccatggcctcaggtggcagtctagaccatggatatccgcatggcctttggtgataacatggtcatggacatcagcacagacccgggcggcagtggggccatggaccttgagtttctaatcctgtcttcaccctgagtgtgggaatcaaaggctgagcaagcactctaccaataaatccagagccctagccgcctccatgccttccttcttgttttaaaagaaacaaacatggctgataacatcgagtccctttagccgccaccccattctttcctcaggaacaaatactgccagatgtttgaagttaacccttcaagttcatgttcaatgttgtcgcctgccaacctgggtatgcagagacatttttggccggccgttttttattacttcattttccagaactcaaacccataatctctcctcacttgctacttcagccactttctttccagccccttgggaagctcctgctctccacacacccaccaccctcccaccttcctcaccaaactcaccctgtctcctttcagattaaatcttatgcttctcccctcccttctccccagtttttttttttcttccccttcaagttattttcttattttgaactcctccaaattctggcatattgggccgggcctgtgtgattactgtttgtcagttctgtgatagtaacaggatacctgagattgtcaaactaaaaagaagaaaggtttgttgaggtcatagtttaggatctttcagttcatggttagtcagtcctgctggtttggggcctgtggtgaggcagcataggatggatgacagaggaaactgcttacctgctggtggccaggaagcagccccctccagggggttggtgatagcaaagagcaaccttttatattaaaaaacatattgtgggttttttaaaaaatacacattcacatccaatgggcaggtgcctagcagctccacagaggctccgtttccaacagccctttcctcctgcggggcccgacctcctgcagaccctgccaccttccagcagtgtcgcggggaaagtctagccttccacacatcacaggccgtggcaactgttcacctccgtgagctgaatagcctgtatttaagtggtgagtgttaatgccctgcttttcagacagattagagaactgttcaagactcggaatcgtctcttcctatatctatctgccataacctacggcacaagggtaggctcaaacaggctttcagtgattgcttagtgagtgaataaaaccattctcgtgtgtgtgtgtgtgtgtgtgtgtgtgtgtgtgtgtgtgtgtgtgtgtgtgtgtgtgtgttcctgtgtatgtgtgtatgtatgtgtacacagaggtcaaaggtcaacactgggtgtcttcctcagcttctctccaccttatatttttaaggcagcatctcttgctgaatctggagttcactgctttagctagagatgacaaaagtgctccatggattcccctgcccagctttttatgtgggtcctgggaactgaaacgcaggtcttcctgctggtgtggcacatggttttctgactgagccatctccctaggccctgagaggtttttctagtcaagcttcagaggctgctaaccatcttcctgcttctagacaatccaaggaattgttagttttgagtatacaaaccccaaagcctttgccagcacaaccagacccacacttcagtacaatttggttgacttacagtcttgtgcactttattcatttcagaactttactccaagaaagggaagctggggacaccggtgccaaaatggagatctgagttcccaggcccttctgacacacgtaggtgtgtagaaatgactgttccatcgaggaagccttacaaagagacacgcactctgtgtttgtcctttctgcttcctggaccacagacatgatggctggagcgtcagtagctctttcaaggctcagaaatggtaaccacagtgtaacaagatagtagttgtggcttctggccagcggggtgctgcacctgccctgtgctgatcacttccaaacttcccaggagaggaggaaacaccctcgcagtgtgcttgagcccagtccccccttctccgagattccccattacttgctgttaggcctaatgcagcaagactttctgaagacctgttgaaaatggtgttagtaagccaggcatggcagtgcgtgccttttatcccagaactggaggtagaggcaggtggatctctgtgagttcgaggtcagcctggtctacagagtgagtgccaggatagctacacagggaaaccctgtcttgaacaaacgaaacaaacaaatgaaaggaaggaagaaaatggtgttattcaaagagtcttcccaacctgcccttcattctctataaaagaaacaaaaaaaaatcatctccaagccagtgcccgtcttgtacctactatctaaacagaaacaagttatctgatacatgttttattctgtttttgtttttgatacaacacatgaacttgatgtctctgcagctttcagtgtgtgtgtgatggggaatgtactgtgtatgtttatcttattgattgttaaataaaatactgtttggctaatgagacagcaagttagacaggactaggggtcaaagaggattctgggaaatgtagtagagaagtgctgatccaggcaggaagtgacatagcaaggagactcatatttaagcaaagagaaacaggaagggccccttttttccctctgctcctgctccagcggcaagatgtgatccaccggcaaggagggacgccaataaggtgtccgataagataagtcttataaaatatatagattaatgataattgagactgagctaacagatgagaatcctagtcattggccaagcaacattgaacctaatacaagtttctgtgcattcatttgggcctaactggggcgggcagctggcataaagcacacatgtggtggtggggcttggcggctaatggcagaaagatttatcgtaacgtgtgtgtgtgtgtgtgtgtgtgtgtgtgtgtgtgtgtgtgtgtatgtgtgtgtatgtatgtatgggcgcgcatgtgtgtgcgcacgtgtgcctttggtcctcttcatgtgtgaatctactggctgtgtggccaccaccccacccccagtttatagcagggactctgttaagggacacatcttaaaaattgttttaaattaagtagtaaagcctcccctgacataccaattatagcatcaatggattcaatatatgaaatcataaacattaacatggtttttaaatgttttgaaacagtttcgttgtatagcccaggctggccctgaaagagtcttattgtgtagcccaggctggcctcaaactctagtcttctgcttcagtgattcagtgctggaattacagttcgtgccaaggctcctgacatcaccttttaattctatttgcttattttttattttaaaatcatactttacatgcagcaataccgtttacatttaaaatagtataatagaaggtttgatattgttttaaacagaagaaaagggggactctatttaattctattgattatccagtgcactgaatatgtgtgtcacactgactcacacaaagtggctttttttgtttttgtttttgtttttcacttttttttatttgttgtttttgtttttagggagggatttttgtcttagttacttttctattgccgtgataaaacaccataaccaaggcaacttattttgtattttgtttgttttgtttttgtttgtttgtttgttttgatttttttttttttttttttttttttttggtttttcgagacaggatttctctgtggctttggaggctgtcctggaacttgctcttgtagaccaggctaatcttgaactcacagagatccacttgcctctgcctcctgagtgctgggattaaaggcgtgcgccatcacggcctggcccaagacaacttataaaagaaaatatgtactgtggcttatgtttcagagggctagaatccatgatggcggattgaaggaccagctgagagtttacatcttgatccacaactcccaggcagagagagaactgggaatcataggaatcttttaaaatcacaaggcctgtaacacatgtggaaaaaggccacacctacacctcccaatccttcccaaacagttctaccaaccagtgaataactatttaaatatatgagcctgggggggcattctcattcaaaccacctaggtttgtacattaaaataatatcaccttttaaaagatgctatgacagctgtgctcattggtgttcaccttcaatcccaacacttgggaggcagaggcaggtggatctctgtgagtctgaggccagcctggtctacagatagagtttcagagcagtcagagctacatagtgagaccatgtctcagaaaaaaaaataacaatataaaaattaaaggtgccatggttaatgcaggtcatagcccagcagctattatccttagcaaagattccgttcctggctgggatgctctgtgtgtgggaaggtaaatagcatccaacacagagcacagaaacaatgccatcagcaggtgacgtgaaattcataagaaggaaccatcaggtcaccttggggtggggggcacgactcttcaggaaaactggatttcccagggcagttttgatttggattcctttgtctacacaagatctattcaactatgtgtcccagtttgggctcccaaatgtgatcactttacagatgctggatccctgcagagagtcaaagtgtatgccttgcatgtgcctggtccccaccagcactcaggctgcccactctgacctgcagcaatctgggagtgtgtctgctctgcctcagtttccttagctctcagccctaggggctgggcttagacctgccgcttacactgtagcaatgctctttggaactttggttggtagacagttcacgggggttggaggagaaggggccctgatgctcatcatatcattcattagggcctcaaggggtgagggatatttggagtttgcagtagcctaccttcaggtggcattagggcatgggctgagagcagacagggccagcagaggcgactcctggcttggaatggtggcccaattagtgtccagagaaactgatcatcaaatcaaagtacctgcctccatgatcccttctatggggattggacaaggaggaggagcaagagaaagtatggaagcatgggcagagcaagctggaagagaataaagcagatgggctgcagatgggcaattgcagcttctctattgatcggggagggaggaagaggctggggtttgcgttctttgaggctggtctttggatctcttcctgtgttcgggttcccacaaaattctgtttatggaaccagtcaggcttgagggagaccattaccagcaactctgagttcccggctctgtctttgctgggcgctgccaggggcttcctcacctgccttatctgaagagccggtttgtgtttccctgatttgttcaggaaggatgtcagccagctgttagctctacatgggcgctctctggccccaacctgacagatcctcagacagcaagtgctgggccgcctgatccccttgctagagcccctcattctctacaccggggagcagcatggaggcccgtgttgggaacacagttatgcccagaggtgctccctcatggggagggccaccctgaaaagctgggctctgggagggctgtgagtcacctaagcaccaggaaggttgacaaaaggacaaaggtgcttccctgggaaatagaaggaagcagctgttttccaggcaaatcagtggtcagccaccgggagaagaagccctcttggaagtgttttgaagtgacacagtcctcacagttcacaatgcactctttcctagggttctggacaaaagagtaccccagttggaaaacctttcacctagacaggtggctcccatgggctcctggactgctggggagcggtctcaggaacagcccatgggtgggcctgacttattttcaggcaccaggaggaggaagtggagcttcctgttattcactcttggtctctgtcaggtcccggatcgcccactgggctttgtccaaggggaaccaccatcatgctgaggcctctgctgaaagccaaagggagaccccagataagatgctttgagacaaccatgggagcctgatttctcaggctcatggcaagcataggcggaggtgagaaaagggagtactgccatttatttagtcattgcaggagctgagcccagggcacatcccattcatcccttcctctgtggagatttaaaaaaaaaaaatacaggcatgttttctttaattgttgtttgtttattgtgatattggagatggaagggtgggtgggatcactcatgctagtcaggcacttcaccactgagccacacctcagcactttacgattttaagattacgtgtgtgtgtgtgtgtgtgtgtgtgtgtgtgtgtgtgtgtgtgtgtgtgtttgtgtgtgtgtttgtgtgtgtgtgtgtgtgtgtgtgtgtgtgtgtgtgtgtatgtatgtgtgtgcgtgctcctcctccttctcctcctccttctcacccaatccccatagaagggatcatggaggcaggtctgaaaggttcaggcattatgctggcctgcccctggtacctggtgaacaggcaataccctggtcagcccaaggttccatgggaactaagtctgcacgcaggtgcagaggacccctttaaaagataggcccctgcccatttactctctctgtgcgctctgttcccctctctctgttcccccccctctgtctctctatggcgaccggctgtggcaatcagccatttaccctgttcctcttcttagtctccccattctgccgggccttataataaatttatagtcttatgtctcatgtctcagcatttctcttttcttctttttaaataaaacaataatattttggcccccacaaaagaataacaaggtcccccttagcagagtagtggacatgacagtgatgactggacttccaagagacctccacaggttgccctgtggtgggcatttgggtaaggcgaggaaaagtaacacacccgatacttaaaattctttcattgggttggggttggatttgggggttagcgtacttactgatcagaggctttcccacaattttggatcaagtgccgggtctctacataatgcctggaagatgggtgcagatatgtggccacctggagctccaggcctgttagcaactgacagaggtaggggtgaaaacaggagggcggtcttgctagcactgccctagctctggaacagagcagacggtggagaactgcttactgtggccttctgtgcagagagacaggcgtgggcaaggttgctggcgccccgagaatgcagtttcaccctggttcagatccagggagtacccgactgctgttgtacttggacacagtagcctctctgggggagctgcagaaggagtgtgaaatgagtctggggtttctgattttccgtggcgcagtgaagtgctctctggagctgcctctgttcccttggccacactgtcaggtcggttctgaagggcctggctagagcagccccatggggtcccgaggctgtgctaacaaaggcagttggggaggtggctgagcttactcctgcttacacaaatggaaaatctaggcgggcacttgactacacaaaacacccctctgtgaagacggctgatctccagctagcttgtgcattccaagccggctttagcatagtcacagccatcgcttggtaacaggcagatgcctgactgtgcccttcgctgaacaccactcatttgaatagctcatgaagcagctgagtggggactagagaggatgaccttgagccatctggcttgtgatttcaggtgtctttaagagaaaattcacagaaaacagatggagaaaaatgcagagtgggacaaggtcagcagttgggagccaccccctgtccactgcctttctcccaactggggcagcacaggctctctgtgcactgtcagagaggccggtatggtcacaaaggtcaccgtcagaaatcccacaggttaaggtaaaaacaggactttcccctcctcctcaccttgccaaaacatctcaaagacctgtcagtgccaagggccaccagactcccttggtgacaaagcttgacctgttccctcagccaggcctgaatcccatgagagactggagacaggtccctcagctcccattaggaccaacctatccactctgctgggggctggggatagataaaacagtctagaacctagacagttacttgaggtagaaatcatcctaggtgatgaccacatgacatttgactggaagtgatacgtctaaatttatgtggccaatgcccctggtcactccgttctttttcttgtctttaaatttttatttcactatttgtttgttttgagacaggatttcactatgtaactctactgaactggaactcactctgtagaccaagaggaccctgaactcagatccacctacctctgcctcctaactactgggattaaaggtgtgtgccaccaggcctgactactacttctttaagtctcaatattagtgcaccctgagtaaatattaaggtcacacagtatctttttctgatactcgaaatttcaaagtcaagaaagtgggtcaaaaatgttgagagtttatgctacatgccaaattactttccaaagtatttaggtcattttattttatttttttattttttggtttttcgagacagggtttctcagtatggctttggaggctgtacttgttatgtttttatttaaaaagaggaaaagagaaagctgcaagatgagacatgttaactagtttattatatgggcccggcagagtagggagactaagaaagaagaggaacaggggtaatggctgaccgccatggccggtcgccatagggaggcagagagagcgcgtaggtgagagagagccaagaagaaacagagtagaaaagcggcgtaaagagaggaagcagagagagagcgccaggaagttggagcttttaaagggaagactgtgcatatacactgaggttccatgcatgcccagagtcctgactactcagcaggccataatgcgtggctggtgacatggtgatgtcgtagcatgatttcgtgccctgactgtggtctgggggcagggtctgtctcttaaagaggtagagcagatcagccttaaagcctgaacctttcagtactggaactagctcttgtagaccaggctggtctcgaactcacagagatccacctgcctctgcctcccaagtgctgggattaaagatgtgtaccaccactgcctggctatgtcattttataatgttgcctttgatgcataagggtaccagtttcacctggctctacaatatttattattattactatcatcatcatttctttatttttattattattacagtgttgggtcatctgctcacaggaatgagtggatgaactgtccccaccccccacccccacccccgctccagtttttggttaaaggtgttggattttttgttttgtttttttctttcggttttttaagacaggggttctctgtgtagccctggccatcctggaacaggctggcctttaactcagtgatttgcctgcctctgccttctgagtgcttagaggtgtgagccaccgccaccctcacactttacccccttttaacctaagtttataatccagagatgagaggtacagagggtaagagcagggcttggggaatccatgatcatagggagtgtgagggctctaccatttccggtaggatctggcaagtcacctgacagctccatgtttctaaagagtagcactgagggatggaccagtaggggggtgcttgcccagtgtctacaaggattaaatcaaatcccctgtacaaggtaggaggggaaggaggagggagagaagggagagtggggagtgttgtggaatattatttatgactgtgtaaaggtgtgttgcatttgtttatgctgcgtttgtttaatggggtaaagatgtgttgcatttttcaccttgcctgcctaaggcacctgctttactaaaaagctgaacaaggggtaggaggggctgttgggcagagagaataagtaggaggagaagaaggaggagagaacgggggaaaaaagcaagggacatgcctggggccagaagtcaggcagctactagccagacagacacgagaagcagtgaaagtaagatagaaagaaagaaagaaagaaagaaagaaagaaagaaagaaagaaagaaagaaaggaaggaagaaaggctaaaagtcctgaggtaaaacatagatgaagaaaattaggataagttataggagctagtgggacaagcataaggcaagcattcataactaatagcaagtctctgcatcatgacttgggagctggttggtggcctaaaggaaaaagcccggtacagggacgagaggggcattggggagaagggagagagagggggaagggagagggagaaaggggagagagggaggagagactagtgtcatctgcataagtttggaagatgctttggatagtatgagtgagttgtcttgacggcacagatgcagggcctggagggctggctcacatgaatcagcccttgccgatctccagaggaccggagttcaattctcagcattggaatcaggccgctcaaaaccacctctaactccagcttccacagcttcttgtaacctatctagggacctgcacacatgtgtgcatcctcacacacagaaacaaacacacttctcattttatggcacaaactcattcaatgtttccttgatattttcccccatagtttctggtcttagaagcttttcttacctgtttgccaaactcttaattaataatattatagtctagtccagtttttaaggtatactctaaaaaacatttttaaatgcttgtattttagttcaattggcattactttggcacattgaataaaaagggggtgttgccacgaactaggttttcttggttgcacatttaattcttatacataaaagggtattcttctggtttccaagtacctttcaagctggggctgcactgtttgaacagggcagacccttgtccaccgctgctgggtggcaggagtccctcctcacagtctttgtcacgagctccggtgcctcactcacttccgtgtccctttgcccctggattccctgagacaccggagcacccttcatttactcgagtagtgaatgaagaggtgcctgtgtcttgtgactgtgagagtttaaagggcaccttcaccttaatagtgacctaaaaaatgtctctagacaaccaagctgcattccttgataccatgaagatgaatacagtgtccctaagatatcatccaaagaatccacgaacagggttggtaagacgcctacaggtcaggccaggcacacccacctggccgcttggatgatgatacatatgtccaaactggcttccagattcatacaagtcccccagaacagatgcccctcacctcaagaccctaccagctcagtaacctgcaagaagaaagaagacatgatgtctgtgagagcaaaataaacatgagcatttgttattattagtgccttgttccatccccacccaaacggaggtgacatacaaatgagagacggatcaaatttgagaatcatttttaaacatgtctgaagatctgtttgacaaggtcataattaaggcatatcatttctcagccagcaaaaggactaaacacagagaagatctgtagctgcactgatcctggactacaccccacccccttgtgttttggttttagaaatccttgattagtagcttgggttagtaaatagtagtatcttgctggtgggagcgtcatctgtttgtcatttgacctttatttttagatctggaatctgtaagaagaataaaagcaaagttaggggttcctgttacagtcagttagctaccctagaggaagccagaaagagctggcaaaacaggagtggaggagaacacatagctcccctccctgccaagggagaggtgactcacctgaaagctccacccaggcaggaaaacccttcacgcttgcgcatttcgtcagccctgcacctgctgggatctcctagctggcatggactctgtacagtcacctggtgtccccagcacaggacaccctgaggcctttttcctactcagtcagatgccagcgggtgtggccagcttcagttacagagcgaataacaaaaaccacttcacctcccctgctgcggtgcaccaagctcctcagacgctggcacaccacagggggcattgcataagccctggaccagcccttctggatttacactccagaaaactctggctctctgatggccgtcggtgtggttctgtatttgctatatctggtccatccttaccattcctgtctgtcttgcacatctgtggcatttctaacagaaagaaagactcacagggtcttcacaccccactgcttttggagatgatacagggagagatccacgctagtgtattcaaagggaacaatgataacctaaacccctgaaaacattaaaatattaagctctatgcataggcacagcataggacaacccctcctatcccatcctcctttctcttggggacttgacaactagtggataccaagttgaactcaagtgctcttgttatgtccaaattcctctcctggcagtggacctctctgtttatcaggaaatgctggcctccgtgttcatgccatctgattattcaaacatttcaacccatgatttacatgtgctcattaggaggcttcctccattcaaatgcattgctgccagggaagatcttttatttttccattacttagagatttagttgaaatggtcaggtaagaaaagtgaaaatttccagggaggaaaggcaagcaggcatacttactcgaatgtccccagcttgcctttccctatggaaacatgttaggtggagcccaagtctaccatagaccagtgaattcatcaccaactttagtttgctgtagttctttctggtctgcagaggaggtgtgacgaggccagaatcctcaaagtggattggctgtgcctagtacaaccccgggcacccattacaggttccttcagtctaacagatctgtgttgcacccagaagactcaggcaggtatcctttaggaacaggagtgtggtcttagggaacaggaccattgttcatgccacgtctgaaaacaataaaaaatggatcacactaatgaaagaaggtctgcaaagagataaactttgtgtgtcttaatggggtaacatacacattgctacttattttttctattaaaattgttccctagccaggaatggtaggtaacacatttctgtaataccaggtagaggcagccagatgaagttccagccagcctctactatatagcaagttcaaggccagccttggctacaggagagcctatctcaataaaacaaaatgtgtttcctgtggattcttttcaagtggaagcatgtagaactccgttttatcattgtagtatattctcattgaaactgaagttataaaaatggcactataatgacagaatgaagacagtggttgcctggagctgagggtagctggacagtcaagaacagggaggactctttaggataatggagacagtctctgtcttgagcccaatgtaggataatggagacagtctctatcttgagcctaatgtaggataatggagacagtctctgtcttgagcccaatgtaggataatggagacagtctctgtcttgagcccaatgtaggataatggagacagtctctatcttgagcccaatggtgtttacacaggcatcatacttgatgagcattactgaactgtatacttaaagctgcactttattgtatgtgaattctacctctgtgataggaatgttcagaaagttcgaagcttgagaggtagataaataaagccatatcagtggggtatactatatttacaaacaatagcaaattccttcggggagggaaaggaagcacagaactaaaggggatgttttgttagttccaaagcaggatgtgagcaaacgtgatcgcgtccgtccgcctgctgcgattgcacttagcagctccatatcgttttcagaaggcccggtaggtaattttggtattttatagattattggagagcaactacatcctgtttcctggaatgcaggaagggctggggtcacctcgcagcacacacaaacaacacaattcatgggccattcgggatgggccatcttggaatgaaaccttggagaaaatgaactggtaatcttttcagattgtccgttgctagctttgggagttcaaatcccacaaaacaagtggtctgtgtgtcttagttactttcctcttattgcaactaaacgcctgaccaaaaacagctaaggaagaatgattttgctctcagtttttaggtacagctcatcatggtgggaaaagccacagcaaccacactgggtagccagagacgaacactcatgctcagctccccttcctatttttcccaggaccccccagcccatggaatggagtcgcccacatttagggtaagtctttccacttcagttaacctaatcaggaggtacctcacagacttgcctgaggtttgtctcctggctgattctagattctgtcaagtttgcaatcgatattagccatcatactaaagagagtttgcaggttattatagtgtcaggaagtcctgatgcccccataatgggcacgttttaggcattagttaaactaaaaaacacaggcttgtgagatggccaagtatctggtgtgaaggcacaggggtctgagtttggatgcccagcatccaggtagctgctgaacatgggggaacacgtctacagccctagcactagaatctacttctgtggaaagaatgggaaggacacggtgggggtgggggtaagagacccctaggtcccggaagatccccaggaatttgctgactaacctgtgcggctaaaatgatggactccaggttcagcaaaagaatactttagaaaataatatggatagtagttgaggaagacagctatactgaattcaggtctccatacatataggcacaaggaaacatgcaagtatgcacacgcatatacaacaacaacacacacaaataataatgttaataataataataataaaattcagaaaccagccaccctcttatccctagccattatgtccactcactcaacaacaacaacaaaattccgtattgtggtggagggcctggagtagcacagtaggcagatgttaaaagaccccggtggctcaggcccccaggatctcggaccaggaccacggccaccccgtcaccaggcgaaggtgaaaacttgatgcaaacagcatgaggctttattgttgtttaacgagctaaccccatgttagcttgggtctttcatctacccacgatggtggatggctaggaaagacctctgagaagccatgggaccgagatattataggacagcataaggggagtgtctaggggtacccacaggctcaggattggtgtgcctccaggcttggagggtttgccctgtgttgattggccaactggttgttatggcccataggccctcccaaggtggttgctatgctctgcaagtcattgctatgcacttgtccgtaaagcacacccagagctataaagcatagcaccaccagctaacttctgattggttcctggccttgaggcaggcatctgacctcctagtgatcaaggcaaggtcagacaagcacgtgttaggctgttatggctgccgaaatggggagctggtcccttcattgttagttctatctgtctgatgagagtcaagctctggggggaaatcgaggaaacaatgttttgattttcttgtattgcacagaggctggccaagaaggcacgtgttataaaagcaaggcacctgccccaggaacagggagggacaaggatcctcctccatggatgatctaatggcagagggaacaaaggttgtcactcggcgcgggggggggggggggggcttggttgagaggatggaacttagcccccgccccccactccgtgttccctgtttcccaggaagttctgactttgtagaggactctctttaatgaacacatacttgggagagcaggcattaagcaaaagtgaatgttgggctggaactcgctgtatccacatcagtcatgatttcagtttatcatgatggatcagcagccatggtgaagacagcccactgggtaataatcttggtttctatcggaactctacttgaacttttaactagaaataacaggcccacggcaaactttctgggactaagcttcctcgtgtggtaaaggccacacagctccagcagcctgtcttcctgctttcctctgaacaggctggctgcaaccgttgactgttccccttgccattccctcatcagtgactatccttatcttcccaccctgaaaacacaaccgttagtataccattagaactcatttcttgggaatgcgtttcactgaaggaacattggaaagatctgatgaaatgccatgttgattgctattacattgtgaactgtgaaaaccagacgttggtggcgcacgcctttaaactgggcacttgggaggcagaggcaggtaggtctctgtgagttcaaggccagcctggtctacagagagagggtcaggacaggctccaaagcaatacagagaaaccctgtctccaaaagccaaaaaataaaaaataaattgtgaactatggacaaagtcttatgcttcccggagatgttttttattatattttattaatttagtgtgtacgtctctctctctctctctctctctctctctctctctctctctctctctctctgtgtgtgtgtgtgtgtgtgtgtgtgtggtggcagccaggacagcttgtaggagtcaattctcctcctaccatgtctgtctgtctccctcttccttccttccttccttccttccttccttccttccttccttccttccttcctttctcccccaccctcccaaaatgagacagagacagggtttctctgtgtaattagctgtcctggcactcactcttgtagaccaggctggccttgaactcacagagatccacctgcctctgcctcctgagtgctgggattaaaggcgtgcgccaccacctgtaccaccgtatatgttttaggattgaactcaggtcatcacacttggcaacaagccccttgtcccactgcgctctctcactggtcctctgaagacttttaggctaggttatttcaccttaaccataagttgtggtacagttccatgtggagtgcttgcctgggacgcataagaccgtgggttctacccctggcaccccccaatccacccttcttatagtcactgttctattgctgtgcaaagaaccacaatcaagacagattttataaaagaaaggggcttgcttcccgtttcagggacttagtcctttatcatcgtggcagcaggcaggcaggcatggtgctggagaagtagctgggagctacattctgatttacaggcagcagcaacagcagagaaagcccctgggctaggtgtaggcttttgaaacttctgagtgcaccccctgtgacataccttctccagcaaggtcacacctactccaacaaggctatacccccaatccttctcaaacagtccactccctggtgactaaaaattcaaatatgagcttatgggggggcattctcattcaaaccaccacaccatccaaaggtagaagaatatagaggatgataattaaaaaaaaaatcttcaggactggggaaggaagaagcctccctggcattagcaatctccaaatgaagccataggcaagactgtgacaccttctcatgagttgcaagagccttccctgtggcatccccctggagagtgtggaaacacttcttaaagtgtagatttgattttgcagttgctacagttcttaggaactgcccccccatgccacccccacttctcctatactctgtaattttctatatgctgttgaattttcaggtcagcgttcttggctcagtctcaagagctgctttcaatgtgaaggcctgggataagcacctcctttacagccattcccacagcacttctggtttctaaagtgatgttataaactgtcaagtgactcagaaatcccaggaacaagtccctgatggagtgcagaaggaatgatgacttcaccggaggctggcccggggaaggagggaggcacgtctctcatcaccgtggcaagcgctcctggcctcacagcagctcctggaagtgatgtgcctggaggcctggctcacatctggctgatccatccctcagcttggctcgggttcctgagggaggggaagaagagaaaaatcaggtgaccaagcagctcacccccctggcccggagaaagcaggaagctgtcatccctggggaaaccggctcagactctgtatccaaggagactgcccctatctccccagacagtcctttctggaaccaacctgcaagctcctcgttcacttacaagctcagtcaccatctgaacccggctcctccttggctagtcagacccaatgaggtccggctgctctgtggtggctgtgacactcctcagctgtagctgggaacccatctgtgttggatctcactggacagttctgcttggctgccacaagagcatgcttcaccttccagcattagaacgggcaggccactgccatgccaggaggtgacacaaccgagaggaagaatgggcagttggagacttggtagcagagagatttatggaggaagaatcttgaccagcagctcttaacctgtgggctgaacaaacctttcacagggattggcttagaccatcctgcatatcagatgtctacattaaggtgcacaggagcagcaaaattacagttatgaaataacaacagaaataattttacggtttgggggtcaccacaacttgaggaattctatgaaagggtcacagcatcaggaaggtgtagaaccactgatcttgacagaaccataggaaggccaggagatcagggccagagctgcaacagtgtaaggtggtactcaagccctccttcccgttccacagacaggtgctgctgaagcctggatggtgcgatgggataccagtatcaaaacggctgccctggagagcttaagagttactccactgaaccacaagaaggtacctctgctcacataggggcctcttatcggtagagtaacaacatgtctgtgacctacctgtaaaacatctggcctggaagtccctaaaaataggaaaagcagtcataaatatgacacatgctcatctcctaatttagtcaccatggcctgaaaatggacagtccaatccctgtgaaagggtcctttatatagaaaagcatgatttttgcatatgtcctacacatatgcccctaaatacttcttcatctctaggtaacttctaatgcctagaatgctataaatcctaagtccataattacagtgctgcacgagttagggtaaagggcaagaaaaaaggtctacccactttcagtatagataccttttttttttttattatttcatgtatttttggtctgtgatagtttgaatctgcagccagggaacccacagatagcgttcactctgtcgttctctattctctctgtctctctgtctctctgtctctctgtctgtctctctctttctctttctctctctctctctctctcttacacacacacacacacacacacacacacacacacacacacacacacacacacgcgcgcgcgctcgctcgcatatgtgtttaaaacttactctgttgtttccagaagaggtgagactgtatagatgccgtggccattttcctgtctcctgaacataaatccagtgattttaaacaatgtacattccttctcacacagttttgttttgttttgttttgttttttcccaagacagggtttctctgtgtagctttggagcctatcctggcagtcgctctggagaccaggctggccttgaactcgtgatcctcctgcctctacctccttcagcaaatcctaccggcgtgcgacaccacaactggcctcgcacagttctaaaggtcataattttgcaatcagtctcactgggttttaatgaaggtgctcacaggctggcatcccttctagaagaaactctgtccccttgccttctcagcctctgtcactacctgcttcttgtggctcacagcccctctttgttctgtctccatttcacaaggataccagggggatcacatcatgcccagagcattgactcaacatatctgcacagtctcttttgcacactaggtagcacagtcccaggtcccagggatgtataccatgggtgtatttgggaccaatattcaactgcagcatgtctcaggggacagccagttgactggctgcacaaaggcctctgtgctggcaaactgaccatagtccagaatcccacctccatcctttttgccaacatcccaaactaacagatgttggctcaacaccatcagacaccattgaacaaactagagtactatgctggctagggctttgtcaacctgacacaagctggagtcacctgggaagagggaacctcaactgagaaaatgcctccctcagattagcctgtgggtaagcctttgggagcattgtgttgattgatgattgaaataggcggccccaaccctttctgggtggtactacctctgagcagggggtcctgaattgtataaaactgagctgagcggggctggagagatggctcagtggttaagagcactggtgctcttccagaggacctgggttcaattcccagcacccacatggcagcttacaactgtctgtaactccagttccaggggatctaacaccctcacaccaatgcacatgaaataaaattatatatacatacatacacaccgagctgagcaagccagtaagcagccctcctccatagcctctgcttcttgaccccaggtttctgccatgagttccagccatgacttccctccaagccagtaagcagccctcctccatagcctctgcttcttgaccccaggtttctgccatgagttccagccatgacttccctcctccatggactgtgacctgagagatgtaagataaaataaactctttcttcccaaggtcacttttagtcgtgattttctgtctcagcaatagaaaccctaaggcaagtaccaactgatctgcttgttccttttcaatcggaaggcgccacatctcctggacttgagaatgtcagcttgctatcatattaaaacgacagaggttccagaggacacagtctgatggaaactctctcagcctgtggtttgtctgttacccacctgaggaccagataagacattcaggggcaggcagattctggaaccacaccccggacctcaggaggggagctgtattttggggggtggggtgcttcttcaactgtcaggtcttaggctcacacgatccaaatatgagttgcactggagacgaaaaagggggtgcacagcttccgggacctcccacacagagctgggctttccagaaagcaccacagaaaacgcagcctagacagctacacactgactcttctctggacccgataactcttctcttagtttgaaattgtgttttgttcttgaaaactcaaaaatgtgagaaatagttcagaaatagtccgttagtctttcccctgccccagctggtggtgacctcttataccacgtagcctgcctttcacaggaccctggcttcctgggagtgtcaccccagatcctcagggaaattgtccctttgcagtctcaactggatctcccatctgaacattgaaagcttaaagagaaccctcgagggacaggcccagttaaaacaggaacgggcgcctccctgtgtgcctatagagaggtctccacaaagggtgccagcgccctctagtggccaaaggcgctgcctcccgtcctggccgagaacagacaggctagtgacagcctcccaaggatcctggaccgccacctcttcaagaccctgcctagggccaggaggaaaatgtgtgccgcttgtgcctcattaccactggtgactttaggatgcgtcgtcactgtgtgagataatgtgtatattttcacaacaatcaccttcccgagtcacagacttcattatttctcagagaggttaagacctctagcactctgttcatactcatgtaacatatgacctgtagacacactgtgagctatgctgtgaacctggtaggaatccagttcctcgaggctattctctggggcactcacacagctttagtaggatagctgccctggaaagtaaaggacagaaaccccccccccccagccaaggaattgtgtgaaccatccacacactcatgtaatcatccacacactcatgtggggagacatacatctgctagctaagtggttctcccagttgagggcaccaacccccttgagcttaaatcagagagaaaatgcattccatggcaggcacacgttggggaaggaatcatagaaacgaaaatgcctacttagcctttgaaaaggacacctcaagggctggagagatggctcaggggttaagagcactgactgctgctcttccagaggttctgagttcaattcccagcaaccacatggtggctcacaaccatctgtaatgtgatctggtgccctcttctggcatgcactgcatacattctttaaaaaaaaaaacatatataaaaaaaagaagaggacacctcaaattcacaggacacctagaagtcactaagatggtcattattaagaaaggaaggaaggagaaaagaaagaaagaaagagcttgtgggactggagaaaatggagcccaatccactgttgttggaaacaaggaatgctgttgctacttggggaaggcagtatggctgttcctcaaacaattaaaaatagtattactgtaagatgcagctattccaaattgagagcacgggaagaggggggagggagctaggagaatgagaaggggagaagaggagggatgcagaggacatgagggagcaaaaaggttgagtcaggggaagaatagacgataacaagaaaggagataccataatagagggagacattttaggtttgcagagaaatcaggcactggggaaatgtctggagatctacaaagatgacaccagctaacaatctaagcaacagaggagaagctaccttaaatgccctcccctgataatgagattgatgactgacttatatgccaccccatagccctcatccagcagctggtggaagtagaagctgacacccacaactaatcactgaactgaactggaatccagatgcagagaaggatgagtgaagagcaaaggggtccagatcatgctggtgaaacccacagaaacagctgacctgaacatcggggaactcttgctccccagactgatacctgggaaaccagcatgggactgattcagaccccaggaacatgaatttcagtgaggaaacctcagaaatctatgggaccttcgtacttagttcagtacttatccctagcacaggtgtggactttcggagcccattccacatagagggatactccctgagccaagacacacgggggtggggggtaggcctaggctctatcccaaaggatacgatagactctgatgacaccctatggaaggcctcaccctccagggggagcagaaaggatatgtgataggtagggttttagttggggggggtggtaggggaggacgggaaggagaagggaactgggattgtcatgaaaaacaatcttgtttctaattcaaattttaaaaatctgaaaaaaaagatggcagctattccatgtctgggtatagaactacaagagttgaaagccaggtctcagatatttgctcatctgtgctcacaacagtgttgtttacaatagctaagacatggcagactcaactgtccatccatgggtgaataggataaagggttctgtgtatccatacagcggaagactatttgacttaaaaaatgataaagttctgatccacactacatgtagcaaccccgaggacaatatactgcaggactcaacatatctaatgctcataatcactaaaatcacgcagagaggacagtggtggtggccagggtctggagggaagggagggccttcagatagttccttaacaagtttcactttccacagagtttcgattacccaaaagtcaactatgactcacacacacacacacacacacacacacacacacacacacacacacacacacaatcacatagaaaatgccagaaataagtttatgtttcaagtgactctccattctgagtgacacgatacgatcttgcctgtcccactccgcacagccccgacatctcatccctttggcctgtgtatccgtgacagcatggatatgttacccatccctgcttagcagccctcgcagtttcaccagatcaactggcccaggaccaccatgtttgtgttccagggagcttatctgacttaccaatgacctcaaagcccaatggcagtaatataaagaaggcatcagtgtttaaacacccaaggacagactatctctgatgccatatgccaatgctgtgcagtacacagaaaaaactgtagtgtgcagtgttgtttatggctaatggatatccacacgatactgtttcgcccatgggtgctgggaattgaacctgtgtcctctggaagaacagtgggttataaaattagaaaagaaaaagaagttaagagggggacggtgttgggtgaagaagaggcaggagctagggtggagtggtgagtggacctgatcaaaagacactgtatacctggatcaaattatctaaaagtattaatgatacgaataggtagatagatggctcttaaccattgagccatccgctagccccaagaacagggaatttaagaaactctgtactctctgctcattttgtgtgtcctacaattttaatactttaaaaagttctagaaggggatggtggtgatagtgtcataccgtgaatcctcttacaaccatggagattgtgcctaaaagtggctaaatgatgataaatcttattgtgagtgtgtgttgccaccattaaaaaataaatagaatacccagggtggtggtacacagctgaaactaaagtaaattggaaagtggaagttggagagagagagagagagagagagagagagagagagagagagagagagagagcgcaacaagcatgcaataaagtgtggaaagaatgaatcagaagaaaaatgggtcagaattggattgtatgttagggaccagagacaattgcacacttagaaataccacaaatgaagttacagtatcattttttatattttaaagtgttgtatgtaaaccaaaaataccatttgaatttcaaaaagtaagaaaacaagagcacaactcttgagagaatggttttcaagtaaagtcagaaaatgtgtggcaggcatgagtttaaaaacaaaacaaaaccagaggctatccagaagcagttttatgtcaggcatggtggccctttaataccacaccagaggcagaggcaggtggatctctgtgagttccagaccagcctggtctacagagtgagttccaggacagccagggctgttacaccgagaaaccctgtctcaaaaaaaaaaaaaaaaaaaaaaaaaaaaaaaaaaaaaaaaaaaaatcagagcctagcaaacattttggggcttgagctctgaaagaacattctggtagcttggagggacaaatcagagatggaggggcatgcgtgagtgtgtggcgatggaagacactcaaccctacctgcgatccaggcagatctcagctgctgttcattctgcctgcctccctctccatctgtctgtcgtctgtccgtccatgcgtccatccatcaacagtatttttatccgttttgtggtaattttgtacatgtatacaacgcatttccatcaggtctactccccactccaccctaacagtgccccctcctaacttcattttccctactttttcttttctaattttataacccatgaatccaatcagtccccctcaaccctcaggtcctgttcttagttccaggagtggggagtcagagccactttatgttttgttccttcatccccgggaggttcttgctaaactggcttggacaattctttgctaaaagcagcctttacgaggaagtagtgtagaagattcatgagtcttaccaaagttagggctaagcaaagaacctttgtcaataccaactaactgatgtatacccacatgtctgcttgtaaaatgcagcatgtcctcctcaatatcctcgaaggtgacaaatctttgtccttcctgggacagattggatttttggccaaaagttactcagaaccaactattacaaagtaggaaatgaaactgaattcccctcctggttgacttttttttggtttttcgagacagggtttctctgtgtagctttaggagcctatcctggcacttgctctggagaccaagctggcctcgaactcacagagatccgcctgcctctgcctcccgagtgctgggattaaaggagtgtgccaccaatgcccagctcctcatgggggttataagttgagtcagacagcaattttaacagaaggaatccaaaagggttctgggtactgtccccctagagattaaacagaaggcataatagtctgattgttttgtgagttttaactcacatttggcagtgttcacatatcccaggttattctgaaatcagtgtgtgtgactcttcatcttgcaccagggtgagctgtttagctcaaagataaagaaagtgggggtaccaaaaacctatcacttagacaaccctagttaggctctgggcaactcttgctatctagacttccaattaaccccaggccttcatttcaagtgctaactaaagtcactcactcactaatttttcccccaagtctctatctataatccagcattcacctcacaggcatcacaagatggccggtcatgcctgtgagggcactttcctgttctttctggtcgttttctgttttgccttctctcaaacattccaaggactatcatttgttttaataatgcattgggaaacaagttgtatccatcagatcgaggccccttagacgaagaaatgatgtgtagaaatgagtgcctgtggacagtctcccaagggcagcccggagctgtcagctttccccttgacccaaggaagtgggcactcaggagcaaggggcccagagggaagtgaaagaaaacagaaagtctttatgtgtgtccttgaaagtaggcgtttttttcccctccaagagcattctggacagattaaagagaaacacaggaacacacacacacatacacttaaaacataaatgaaataacatttcccagattcctggcttggcaaaaatcctttcatcttagattgcatggggactaaaacaaaagataagcaaataaaagataaaatgagcacttaaaatttttattggtcaatttaggataccacatgtttacaatggggaataaaaagagggaaggtacccaggaatatgtattttattttgctttctgtgtttattttaagcaacaattttaaactatatatataaattacacattatataaaatatgtatataaactatatagaaatataaaacacagattttagatacatagtgcagtgtatttgggtgggtatgtatgtatatccgtgtatcctataccctgataaaaacataccacaattctatcaccccaaaagttctggggatcccttgcacacactgaattcactaaattccttgaattaaaatgactactttttggtttttggagacagggtttctttgtgtagccctggctattctggaacttgttctgtagaccaggctggttttgaactcagagatctgcctgctgtgctgggattaaagttgtgtgtgcctccactccccagcctttttgttttttaaggcaaggtctaatgtatcccaggctggccttcaacttgctatgtagctaaggatgaccttggactcctagcaacaggattccacacaggacttcctgcacgctaggcaagcactctgttgagctacattcctctgtcccacaatgccaattttatgctctgtgaatttcacagtaattaaaggagaaataaagctactgagatactatgacaaattgttggcaatttcagatcactccacacttcccagatcctgtgatcacagccctccacccctggcagatcctcggatctcaatgcaattttcatcccggttcccatttgcccagagctccccacatctctgaagcactctagaaaatcaatcaggagaatgctcacgacgttagattacttcagaccttacttagactccattttaaagtacatgcaacccgagggagaggcggccgagcatcctaaaattacaaagcaaataccgaacccctgtcccgtggcactgccaggcacctaagaaaaggaaaggcactacccaacttcaaattccaaagtcagtgtgatgtcgcggtctccagggcgaatcaccgcgcgggcctggaccttctgaacccagtgtatctctttaaacccggggaggtgccaagtgcaccggggagaagggggtagcttggcaccgcccaggggatgggacggggcggagccagatcagtgggcgggcccctaccgagggcgtgtccggggcgtgggcgaaccgggtagtgggcggggccggcgctagcccctgagaggcgctccgcccgcggcgtaaactctaccctgcgccgcggcggagcaggtgagccgagggcgggggctgggtgcgagcgacccagtaccttgtcactgatcgcgggtagccagcatcatggagagcccggatgcagccaggccctccttgcgcacgcccctgaccgctgcagcaaggccccctcggggtacccgggtgcgggatccaggctgtggccccggcggcgatcgtggcctttttggctggcgcgggggcgaggagaaggcgccggggaggcggcagtgcggccggaccagaaccgggggcttggaaggagcgtaggaagcggccctgggcctctggcagcgtccgggtgtcctcagcgtcccttcctgcctcgggagccgcaggcagggtaggcgcggagcgaggtgttaaagggccagtgcacgtgggtctcacggctgtattgactatgcattttggtctctgctatctaggacctaacctggtccacctgggctctgctacggatgacgagggagtggggactttttgtgtgaggagcggggcttaggacagggccagaggctggctctgaggctggcgttctgttactagccgtgtttgggtgttttgtaagtctcttaaagcaatggggagacgcccagaatcaagcctttgaagccgaaggagctcgaaagcaaaaatctagttgccactgaattttactgatgaagaaacagcgcctagggctaaggatgcagctcatggaagagcgcttgccaagcatgcgtgaggccaggggaggaaagggagggtgggagacaacaactctcagaactaagaagtgcagttgcccaaggtctcctggctaagatacagtagagccgggcttacagcctgctgcctgggcctctacttctgctgtccagacccaagtgctttgctagttagaggaaatgtgctagcatctctgcttaggtattcacctttaaagggatgagccgctggtgaaataattgcatccgtttacagatggaggatctagatcagaacagatgcagaccaatttaactcaaaatggacagtcgtccccagaatagtctgttggggaccgagactccggcgtccagaatggatgcacctgatgtctttataggccctccgtgaacacatgagcctcccgggccttcagccaagacttctgaaagtaattaaaggttctgtgtaagctgctccaggtgtgtgaggctcaggttccccgttgggagtaggtggctttgtgggagctgggaacagtatcaggtcccgtgttttcagtttgtgaagggcccagcgtcttgacttgagcccagagatggccatccatccaggttcatcccacggctcccaggatggtggcttggatcaggctctcaggaatagagaggggggatggcagaggtacaggataggatggaagctgtgccaggtttagagaactatatcttactatattgacatgcccaggccccaaatgtttttatgtggaaatgaatgtttctcctccctgagctgagacaggccaggatgagggatgctgccagaggctgccacttgctctgtctgatggcctggaaccagagggtcaggctgctcgaaggcctgtagcacacagtttcccatgtgagtttcttgccagacttggcctttccgggttattggtataacagccatgtgacatgcccatgtgttaggagttgggcattcatgataagaagccattttgttcagtggttattacagttattataaaaaacttagtagtgggccaaaaagatggctcagcagttaagagcactggctgcactcccagaggaccatattcaacatggaggttcacaaccatctctaactccaattgtaagccaattttggcctctgtgggcactaggcacacatgtgctgaacagacatacatgcagacaaaatatctatacacacaaactataatgaaaaattttaaagaacgtaggtaatgtctgtaattccagtgcacagtcactgaggcaaggagagggttgtgagctcaaggcaaccttgagctgtgtagtgagcttcaggccaacatgagctacataatgagaacggtctcagaaaacaagcaaaacaaaacacaggacacaaaactaaagggactctgaaacagttattatgactctcttaaagtcagggaacctgagttctggggagttgtgtgtgggggggacggctgcccagctgtgtgaccaaactgcctgccagcgcaggatttggacattgttacatatattatctttacctttggagtggtgcacaggcttgccacaggcacctcttatctgtgtctacactgctaccaagaacatttctgtgaggtctttattaacaactgcctgagaaccttcgagaaaaaaaatgtttgtattttgcgacaggattttgctgtgtggccctggttggtttggtactctttatgtagccaaggctggccttaaactaatggcaatctcctgcctcagcttctttctcccagtgcttttgattctagacaagtgccatcactgcagcttgtcctcccgccccccaaagaaaccaaacacaagccagacatgatggggcactcctttaatcccagcacccggaggcagaggcaggcggatctctgagtttgagtaaaccaaaattcctgtgatctcagcacttgcaggtagaggcaggaagatccagagtttaatgttatccaggctgtaatagtgagttcccctgttagaatatcaaagctgagacaaaagggagcgagggggagagaagaaaccaccaaagctctttgtgtgtgtgtgtgtgtgtgtgtgagagagagagagagagagagagagagagagagagagagagagagagagagaaagggaaggaggaagggaagggaaggaggaagaaagggagaaggatctttctaatgaaaacttgtgtggctctttttcagctgttgctttgaggttaggccactgctcagctgggaccccacagacagcaaatgtttccgctactgttgccacctgttgtggggctgtggcccctggggagtggtgctcagtccacaaacagtctcctccccaggcttagggatgatgtcactgccactggaacacttgggaaaagaataattccaagtcaatcctcaggaaagagacattcactaaggagacggttctctgtagcctgtccattggctgagagaacaggttgcttgtttgttcatctttaccttttttgtttctgtttttgtttttgttttgagatagagtttctctgtggaacatccctggctaccctggagcttgcttttgtagagcaggctgccctggacctcagagagtgagttcagtcccagtgctgggcttgaaggtgtttgccactgctgcctgccttgttttacttgctgggcttgaaggtgtgtgccgccactgcttgccttgttttactcatttttgcagatgaaggaatctaaaggcttcccgccttcctattacaccttagccagaagcttcctcatgtttttaaaagtaaaagtaatacatacttattctaaaagcatgcctttaaaaagacatctcttcgccctcagctcaggaataactgctctgggtacctgcaggtatttcacagatggggtctgatgagaggccttctggtcattggaggtgtgagggtgtcacttttttttactttctgggcctgatgtgagtagttttgctgtaccacaagcccaaagccacaggcccaactgaccctgggttctgttgtaaaactgaagcaaagtaaaccatttttaaaaatgtagattgtatcctaggtgtttgtttctagggacagagagctaccagatttgatgggtgtggcaagtcaatgaaaatgtctctgtttcttttactagtcccatgtcaggacactttcccgagtgtctttaaaaatgacccaggaaagccctatctcctcccctcgtcgccatgggttcgcaggtgcatcttcagcctcacagacctgcaggaatgggagatgggggcgtgcaagagacacttcattgagggctgtaagctggcatgatcggggagtgggcagggggcacttctagatatagccttgtctgtgacagccacatgccatcttaacctcgagtgtgctcccaacaagcctgagggggtggctgcccggcctctgtgtgcgggaacctgatagggctggttgggacagggagtggtgttctgagggcagtttggagacctgtaaactgttggttttcatctgactcctttagtcccccttccaccctgggctttggtttcctgaactatgaaacagggcaccaactgatggcgcataaggcactcagccaggctttaacatcatcctatcgacaagccctttgacaaaatgttcccattgccctgctgaggctgaatggaagcagggtctccctgaggcctggccctcgtccatgttgctggtggcttagcagttctctggcttccttagaagggcactggttagcttcagtaatccctctcagtgttttctcctgtctccatgataactcccatttattgaacacccactgaggctacacactttacaccccctgtcttacaaggcaaccaagtctgtttccagaaggggaaaaactcctgtcaccttgcatggtcagaagctgcccaggatatatggttcatatcacacaagtctctgtttgaccactggctgttgtatctcatttaaagaaaaactagtttttacttgaaggtggtttgctaggggcaactctccctgtcccttccccctaactacccttcccccacgctacttcaggaaatgaggaaaattgccccaacccaggtactccgagagaaaaataggtaaaggagcttaatccagaggctaaaatgaggatcacgaggccccacttgggggtcttgggtctggccctcttaactcccgttctgcctgagatctcccaaagtccaggagtgccaggtggaccagccaactacacagtcaggtgtgaagggatagaggtaggtctggaatctgtgagatctctcagggtgttgcgggattggggaaacccttccctagcgtagagaagactgggactttccaggggttatggaattctgggaagtagccatgtgaccacagaaggtgaccttttgaaagccaaggacattgttctgtaggccctttgggaaggtgtcagggaatcctagcctctacagctctccatatagtttgcagcatgatttggagcatgattttccataaggctctggaattttctgtggcattttaaaacgtctttcctgccagagccactgggtttaaacattagggcaaacctttgcttttattctgtgagaatcaggttaaggaaattgggtcacccggtttccatgataacagcaggcaccagcaggcaggctccctgagttcagctaatcaacattttgatttcagtcagagagctagtaaaagtccgaagagggtgcttaatcccacagccacggggcaggcacggcttccagaacattctcccccctaccccaacccctctgtttgcctgcagaccccctgcaggagtgccggctggtttagtgtgtgtcagcactggtaggagctgtgctccaaccccacctgtgctgagtcaggctccccaggagctcgttgcagcactctgatgtggctgcagatccattgggtttgtttatcagcacatttgagtggtgatttttttcccctctgaggatttcagtgccattaggcttcagaacagagaggcctcgctgaccctaaatgggagccagttggagaagcatctgttgtcattcagggctttggagaaaatgtcagtggcttcctggattctcatctgttttcccagaccaacttggtgattcaggagagagagggaaccctatgtgtcgatgcctcctgttcccttttacagatcagtagcttctcaggtatgatggcgcgacactctggaagcagaagcagaactctgagttccaggctgtcttggtttaggcatctagttccaggccaaccagggctgtaccgtgagaccttatctcagaagaagaaaaaaagaaagcagtagattaaagatgcaactcatcttgattattttaaaaaataaatgagagcagctggagatgtaactcagtaaagggcttgcctagtgtgtaaaccctgggcctgaccccagcacagtgtaaattgggtgtagcggcgcacacctgtgatccaagcccttgggaggctgaggcaggagtgtggtgatatttatgatttaataaagcctctggagatcaaaatgcaaaactagccacagccatagagccaggcaggcagtagtgatacacacctttaatgccaggactcaggagacagagatctctgttagttcaaggccacactgagctacgcaaaattgatccagtctaaaagagaaatagctcactcaaaggtgattgagatcacttgggatcacacaccttaaatcacagcacttgggaggtggagacgggagtgatatggctgggtagagaggattataaagcaggaggagacaggaactctgaggattacagtctggtttttggtggagagattgcactctcgaattgcagtctgaggctcgatggcaagcaatgtggtctggattgcactcggaggattcatggagacgggatcatacattttggtctgaggtggaggtaagacccctgatcttcagcttgaaccccaatatctgtctctgggtttttaattcgaaatacatagaaggatcagaagttcaaggtcatccttagctacatagttaagatagaagccaaccagggatacaggagaccctgtctgaaaaattttaatggaggaacacagaaaaatacaaagaaaaaaatcacaatcaccccagcctaaagataatgacttttaatgttttgtaatagttttaacaggtgtgtgtgtgtgtgtgtgtgtgtgtgtgtgtgtgtgtgtgtgtgtaaattcagatggttatgagaatgtttacagcctgtttaatctaacttcactttaattgttactaagtgttgtttgaagtaagactttggtggtcctgtgatagtccccatcagatgaacttgcaatgggccctcttacaagccaaggaaaatctgtcctctgatgagcggatgcccaaagtggtgatgaaaaccaagtcttatggaaaccgtgttttgttttctgaacatacacacttgtgatagtttaatttgtaattgggcacagcaaaaagattaataagaacaaactgacaattagaacgatactgtagtgaaagctacttagaatgtacacattgattactctggaattttccatttcatgtttttggacctcagctgaccactgatatctgtaactacaggatgtggaaatgcagataaggggtgagggtggggggtgttcctgtgccagagaaaagagtcagaaatttcagtcatttttacaaataactacagcacatatttttgtatgaatttatttttcttagataaaataccaagaagtagcatttcctgaatcaaaaggtctaaatctgcgtagctttgaggttttcctgtttttagtactgtacctatagtttacacacacacacacacacacagagttttcagttctatatgtatagttcacacacacaccctagcatctgacacccagatcttccagccctccttaggtgttgtttggagactttgctagtctgagaagtgtttactcctttcttcctaattctgcctgaccaggtcctttgttcaggacaaagagctgtgcagttttaatcttcgttcccatggacatggaagtggaaggcactgggtgaaaaaggctcccttcccttcctgagccaggcccaccccaggcaggtggtgagggtgcagagttgccgtctcaaaacacactgcccacggcaagtaggcctgtgaagctgtgtccccttaaactgagttctcttgggtagactgttggttccaaagcttggcccccaggaagcagaaccactcccctgaagccctgggctcagttgagcttccaggattccaagtgttagggcaatagagcacacccacctaggacaggtgtgtagcctagggataccctcccgggagatacccgctgttgtgcttaagagaaagacaccatgtgacagggttcaagcagaggggttttcattggggaaacagatcataaaaagggaaaggtaagcagggagaccagcctctggagacaggagcagcaggagagaggaaagaagaaagggggagaaagataggagaggggggaagagagaggagaggggaacagtcagtgagagggggaagaaagagaaggatgggaggtggacagggcccttttaaagggaacacagaaaatatgcacaggtggtgctgttagtggctgcagctgagggtgtgtcctgtcagaaccccaaggccaggccagtgcagatgcctgaacactaacactgggctgaattagtctcccttccctgggatagtctaccctacccaattccacctcagtcccttggtggtactgaggcaagatcatgttatgttcccatcttgttcatgtacgggaatgatttcctctttccagaatgttcggcctccttcagtctccgctcatacagctttctggcccactccctgtccctctcagtcctcaggacccaaccaaggtcagccagctctaacagcaacacactgtttcctctgaacttgagtagtagagggtcctcagcagctcctccttgtgcccctgccattctgccgctgtgttcccgttcccagtgcctggtagaacctgagaggcagcttctaggggctctgggtgtgtccactttgcaaatcctgtgaagacagagggtatcttcttagtaggttttattttattttattttttttccctatcagagaggtaaaacatgcaggccctgtattatctttgtagtggcaggttgaggggaagtccttgtgggaattatctaggccacagccaggatggctgtcttctcacttgaagatcacatgaattccaagagtgacttgtctggagacaagcttttagccaacagcagatctgctcctacctcaatagaataaagctcaactctgaggtggtgatgctggtagtggcaatgtcctcccagacgtcggcacagtcacatcctcccagaggttgtgcctgaacccaaaatgtagggacctggagttggactcggtcccacagggtgctgcttcgtcagacagagtaccatgagaaccatgcagaattcttggcggggggggggcgggggggggcggggggcaggggacgggggggggcaggctcccttcccccaatcccttagtgtgggtactgataagtattttttttaaaatccctggttgtgggttcctcccctgatgcaataatccaaatccagctgaattaataggatcaggttttagtaaacagagcaaagcaattcctgggtgactcttggaaaggcaggagaggagccaccacttggtgggctttctggaggcagggtctggagagagagagagctggggccgagatggaggctccaggggttgtgtccccctactggctgggtggctcctaagacttagctaatgttttttgagcttaagactctagtctacatgtaccccacactcaggaacccctggatggtgtcccattttcaacccacagacactctgggtttttggatcacattcagtcttccttagtaaggtctctctcctcattttggtccagcctggccagtatcttaggttctatcctccatgtctcccccatagaagctcctcccaacagtctgccttccccattgggccactcaaacccccccccccatcatcaggacacttcctcctggcctcggtccttcccctcagtcaccagctagatggacacgtgtcaacacccaacttttcttgagatgacatgagcctccttggtgtggctgtagtctgacctgcctactgtccccccagcaggaacttaaccccaacacgagtcttctccaggaaacatgaaatctctgcttcttagataaagttcctttgtgatatgtcatttgtcatattggaattttttttcctctgggacacgattgctgcttattcaagattaaagccccagagccatgcacagagtagattttccacagatgcttattgattgaacaagcatgttgacagttcagagtgaccaggacttttctgattgggcattttgttccatgtgattggattctactcaagccagtcacaaacaaggctgctgtggcctgctggcttttgaaactgctgttttcagcaattctttgacatgtatatctaggaaggttgtaagagggaagaactgtgcctggtgttcaaaccctccccccacccccgcccgccatctcccagctgccccccccccactgcctttacctgtcgggaaagtggaacaagggtccctgtgtttattttccaggagcttctgaggcaggaccatgctcacattcatggcctctgacagtgaggaagaggtgtgcgatgagcggacatccttgatgtcagccgagagccccacatcacgctcctgccaggagggcaggccaggcccggaggatggagagaacatggcccagtgggtaggtcccaccagcaactgttggcctgaaaacagagccattgtggggaaagaaaaagaaaaacaaaacagggccatgaggttcctatgtctttttatttgaagatttatttttgtttttagttatgtgtattaacacatgtctctgtggaggtatgtgcatgtgctcaggtgtccatggaggccagcaggaggcatcatagcccctggagctggagaaataggggtgagcctcctgacctgggggctggcaactgaactcaggcctcttacaagagcagtgtaagacccctggaaagctcaggcctccaggatcttagcccagggcctcagccaccccaatcaccatgtggagttgaaagcttgatacaaacaatgcaaactgcatgaggctttattgttgtttaacgagctaaccccatgttagctcaggtctttcatccatctgccatggcggatggctagaaaagacagctcgaagcatctgcatagagatattgtaggacagcgtaaggggaatgtctaggggtacacaaggctcaggattggtgtggctccaggcttggagggtttgccctgtgttgattggtcaactggttgttatggcccataggccctcccagggtggttgctatgctctgtgcgtcattgctgtgcacctgtccgtaaatcacacccagagccgtaaagcatagcaccaccagctaacttctgattggttccttgccacgaggcaggtatctaacctcttagtgactaagacaaggtcagacaagcatgtgttcagctgttatggctgccgaaatggggagctggtcccttcaagcagtaagtgctcttaactgcccagccgtgtccagccgcctcctgtgtcttcttggttactgaagttgggtcttacatgtctccctaagactttagtactgaaagtggggtccccagtgtgctctgcttgggaagaagtagaacctttaaggaatggaaccttgtggagagcttcaggtcattggagggggtggagcttaattgtgggcgcccctccccctatgctcccaatttgctcaggagatcttgtccctttccccttctctgggggaccatgtatgtctctcttagagtcctctctttctgtgtcctgactatgaggtgagcagcttgcacctctccatggtttctgccacagtgtggttaccacaggcacaaagcaacagggctaatccaacacagatagagaccattgcttttagatgctgaattatcccaggtgtttgttatagagagagaaagctgactaactcacgaatgaaaccaggcattcttccactcgggaagagcagataaacgtaaaaactgaccaaaatggtgtccactggccatgacccacctgtgtcttcatctgtaagggcttgcagtagactacacaattgcagtatacagtgggctggctgacaaattcccttcacctctcacctgcctttcaaatgcaggctgctacctttaggtactttgagtctgggtgcttgggacaggccaatggcatggaaacattaagatgataggacaaaagctactggaagcagaggatttgggtaggcagccagacagggtaaccagagctgagctgccctgagtcaggcttgacttttgtgctgcactgtgacccttactgttgcaacctcaggccaggacaacggtagagtcgctagtcaactttgccgtgtccctcgtggtctgcaaaccgcatctgaggttgcctggatctcattcaattttattccttgtggtaattgagaacttttccatgcccagggcctttgtcccctccagccacccttaatccttaaccttgaaatctgagccccttgctccttgttctcatcgcttagcctgtgagtgagcctcagtggggtctcacagtccaaggccactatccataggttccccagagtttcttctcttatctcctggctgtttgagcctcttagttgctttgtttccagtctactagatttttttgctccttggtctcacatggagatctaggttagagctctccctgcagagaactggttctggaggagccatgtgtttcgatgttcaatgaaagtcccctccagtctcgttctagttagccaacgaaaatgtttggcttccgtttcccttctcatacccagcctgtccaatgtggccatgttggttagcagccttagctcctggccttgggaagggcaggggtctttgatggatgcttgtgtggctatgcaggctagctctaaaccttctctaccactgtcctaaactctttatgtgttctgagacccaaatcgaagctcacactcctcatgtctgaaaaacagcatttaaccttctcagttctacttccaaaagccgctgcaggagcagctcaccctgggagcttctgtggccctcactgtattgtttcccacagaggagccaggacagcgaggaagactgtgaggaggaccccgacggctacgcctgcagtcggggtcccgggcggccaccgggcctggaggaagagctgaccctcaagtacggggcgaagcatgtgatcatgctgtttgtccctgtcacactgtgcatgattgtggtggtcgccaccatcaagtctgtccgcttctacacagagaagaatgggcagctgtgagttgggggcctggctggcattgggaggttggggtggtgattgattttggggggtcataggctctctcagctactgtgcctgtaactctgtgctggtggccatggagagcagtgacaaagactgggctcataccctgactcactgcctcctatcatgtgacttgtctgggcacatatctgacctgtgtgccttcatttcctggtttgtcacgggtttaattatggggctacctggagaattaggtgggctaattaacatgaaaggtgccatgtcacagtgttcaccgaagacgaagctgtatctgaatacaggctggctctggtaccatagcactgagctccatgtaccaagtatctagttctggcccactgtgtctcaaacacatgtgaccccagttgagtcatgtcctgtctgggtctctgctcccttagatgtgagatggcagggttggagcagatgatttcttagcgtacttcagcagccagggaagatgtatcaggcccttttattactttaatggatagagcacggagtgctctctaacttagctctttcctctcccctccctggctcctcactgactgcatcctcagcatccttgtctttagagacttgctgttcagattggattttgatcagttttattctttaggaaagagaaggtgggaaggtcctcacccctaagatgcttgtagcctgtgggggctcctaatagcacaggggaagggtttgagaggacagggccagcatagctcctggcaggctgagctgggaagagcaaggtacatgtgaactgattccagagctggggcagtgcctgtggctgcagttgggggagccgggggtgtgggagtcttaggctgcagaatggcaatggaatgtattgtcctaggggaagagaaccaatgaaagtgcgttacgagaaagggtgtattagattggcttatacaataaagtagtgtaaagggatatattaggttgctgtatcgatgataggtagtcctacaatggctgtctgcacattaaagaggcagagaaccccatagctgcttagaccataaggcctgatacctcagcagtcccaattgttgctgaatgcctggaagattcccagagagccactggtctttagtccacatgggaaggctgaggttctagtgtcagcgaagggtagcaacggcagcaacagtagggtggatgcccgcactggcagggagcaactgcctctctccaacctctttccacctgggctgccaacagaaggagctgcccaccccggggagggttaattttgcccagaaacccacctagaaggatgctacttagttgactccagatccactcacagtgacaatcaaaattaatcattgcatggagaagcaggcagccaatcttgtaggtagggatgagagctgaggacctgggagtgggagagtcaagtggaggagccaggtttcagagggatacagtctgtcctttctgtcatgacgttatcagagtgctccaagacattggccctagaggcagaggccactcatacagatagtgatggcccagccaatgccagggttctaactgaggctcttctggtgacttcttcagcatctacacgcccttcactgaggacacgccctcagtgggccagcgtctcctcaactctgtgctgaacaccctcatcatgatcagcgtcatcgtggtcatgaccatcttcctagtggtactctacaagtatcgatgctacaaggtgaggcctggagcacccctgctgtgatgtggatggagccaggagtaggttgtcttttcatgttctctgacaccgtgggaaggtgacctaatgccaactttgaaactgcatgacccccacccgcccccactgtcttcagagctcttcaaatcacagcatttctgtcacattctcctgctctgaagttagttttatttcctctgaagttctgcttttgttcgttcaccccaagactttttctaggcttttttttttttccccatcttcctgtagccagggatgctcgtgtgctgtgtgaaggtctcctgaccctggaagcttttgggctggattctcctgcagaccttgagtctccccagggagtcctgaagagtcacaacccatgtgatctcagttatagacaacatcatccccaatgatgtcatactccccatcccaagatccccaaatggggattaaattttggaccttgcacacactgctgaactgtacccttaacacgtgtgttgggggggggggggggggtgtgtgcctgccatggtcagaagtcagctctctcctttttattctgtgggctccaggaattaaactcggatcctcaggcttggcagcaagcccctttaccctctgacccatctctcctgcccactttctatagtttttgtagacaaggtcttgctaagttgaccaggcaattctcctgcatcagcttcaccagttaaactggtgttacagacctagaaaggcctaactgtgtcatcaacttttagacactggatttaggctgcaggctttgaaaccgtaaagactaacaggaagttgagcgagacattacctcttcaaaactcgtgtcacaggcatagcatggtcctttgtgttttggcagctgtgcgtatggaaaaggaagagaggaggaggccatggtgcagggagggggccagccatcggcccagctgggtgatagagggttgaaccgtaggagaggctatcaggaaatgttccatgatggaatcttagctcatcagtagcaattgcccgtgtaaatgaggcaaagcttccacataccctgaaggtactaaaggacaaggaggggtaacggtggaaggaatgtcggggagggtggcttagacatagaaaacatgacaacaagctagcaacagcatgggaagtgatcctgctgtggtcagtgtgtgtcacatggccagccccatagaagtggcttcaccatccattcagtcagggtcactgggaagttcccagaggacatagcccagacaagccgtagttggggtaaagactgtgagtagatttcctgaggccatgccttcccttcccataagtctgggtgtgcagcccagccctgggccttcctccaggtagactgggtctctcagagaccatgaccaaggttagtccttagaagtaaagagaggcagagagggggtggcaccattttactcctgtcttgtcctcgacccctccatgctcagccaggagaggaggggcaattctcctgagtacttgtctggagatcttagcaggaagggacttccctctgtcaagcccctcaggaggcttgccctgttcactcagtctaaacagcagccagtgagtccctgactctttgtctggattggccttcatcttacctgctccaccaccacccagtgccagctttggtggctgaagggaaggacagatggaagtgtctgtctgtctgtctggagcacctccgtcctgctcacggccctcttgtttctgtcgtcagttcatccacggctggctgatcctgtcttccctcatgctcctcttcttgttcacctacatctacctcgggtgagtgagtgagtgctggctgctgagcagccgctccctgcacacagctggataagataagagggagcgggcagggaaaggtgctcaccctcagagtcagctgccccaggagcccaggcctccaggctttgacacaggagtgggctccgtggtaggtcacgcgtttctttctggcttttgatttaaaatgagcctaaaggaagcatggcacagccttcttagcactttcagccagtagacacctctccaaggtgcattctgctttcgggaggggcgtggctaagcctgggtacttcctagtgaatctgtcctcttgccctttgatttgggatatcagcctaacccagaggctcaaagaaaagcagttttcaaggatcctgtctttgcacagggttttccaggtgggtccctcacactctccaccacattccagaaaatactgcgtggttaggcgtggggatgggaatgttgtaaataaaatccagattgggactgagggcatcaaacagcttagggtgtggacccctccccaccccgagtgtcccataccctgctccaccttggacctgcagggaagtactcaagacctacaacgtggccatggactaccccacactcttcctggccgtctggaattttggagccgtgggcatggtatgcattcactggaagggaccactggtgctgcagcaggcttacctcatcatgatcagcgcactcatggccctggtgttcatcaagtacctgccagagtggtctgcctgggtcatcttgggtgccatctctgtgtatggtaggtagcttgggcctggtgggaacctgggtgaatctggagtggtgtcttagttagccacccttgcattgctgtgaccaaaatgattgacagaaacaatatagggaagaaagatttattttggctcatagtttcagaggcaagggagcctggctcactaggagcaagtgacagaggctcctggcagtggtccaggaagcagggagcttatgggagccaggggctgggtctaaccttcaaaagtaaaggccacccctagtgagctgcatcccttagctaggcccccacctcccaaagagtccaaagcctcctaaaatagtgtcacccactagaggtgaagcattcaaaacacaagcctatagcagacatttcacattcaaatggtaacaggtgagaagtcacacaggacatttcaccccctatcttgagaagaccttcccacagactccctttgtgatacttgggacatacacccccaaagtgcccgctctcactgcccacaactgccgattacgctcatcaagcgtggacgtgcaggacgtgcagccactggttcctcaggacgagtctgagtgcactgtgcacaacgcctatctccaaccttcgccattagctgttgtttaagtagcgttagtgccacaactcccattttaaggacagacatcttgaggtgtaggtaagtaggacttccaagaccgtcctctgggtctcggcgtcttgctttccctactttgtggttacctgctttggctccagctagtgcaaactctagcttggtgggcttgggacaccattccttcaggaaggtgtgccctggaactcacttaggttcttggtgacagagaggtggctcctctttgcactgcttgggaataaaggtcccctttaatatgacaaggatatctctgttttcccagatcttgtggctgtgctgtgccctaagggaccactaaggatgctggtggaaactgcccaggagagaaacgagcccatatttcctgccctgatatactcatgtgagtggtcccatgcctgtgccagaccgtgggggtcaacaggtagccttttgtggagacactgtcattggtcatgattttgatagttaacaggatatgtactcgatctcaaccaaaggtgaggatcaagtcatgacagcattatgagggccaccacctgctggaggggtctacttctagaaaccctggtgggctggattttgcccaggaagaaggtttggaagtcagggttggaagggcgttactggagggatgtggacagtcctgtggccatattctgtccactatctggcagcccacactgggtataggtcatatccccatgaacctgctgctttttagagccatgcaaccaccactcagtcctgcagctttggaggacaggggaccctgcttctcctgggggttcatgggcagtgaaagttggtcatctctgaagggaaggcgtagggatcgtctctggcctgggaggcatgtcagagggtgtgggtttatgtatgtacttaacagatgccaccattttaaattgagtgcctgcttagtggtgggccctgtgtgagacatagacgtcttacaggaagcaaggttatgtgaactggggctcacagagttctctccctgtcgcggcagtggtcaccctctgttgacagtgggtctctctaagtatacagtccgagattctgggttctgatgccacgggtccctgggaaaccgtctgcagatctgggtaatcgtaacgcatgagaaatcaagcttagaatggagagctgccagcagcacgccccttggcttgaaagcacaacagggatgctctaagaatgagggatggatgattccccccagtctgagtgctcgggctgggtgcttccttgtgtgcaaaggaggttccttgtcttgggtggaggtgaactaaggaagtagataattgtgagccaggaggtagcaaatgccgttgaagaccaggcatggacaaggggccaaggacttcaggaccacaggggaggctcttttgcaaaagatggcgagggaatcctcatttataggtcacacttggccagagccctgacttaggggttagcagtaggtagaaatctggaggccagcacttggggtaagaggaacagccgcagatacgaagacctgaggtaggcctgggctgggtgtgctcagggagcacccagagtccaacgtggctagggcagatgggaggagaggatggtagtgaggggagggtcctgacggtgtaagccctgcagaacacggtgtgacacactggcccttttcctgaaggagcgggaagcccctgcaagacctaggccaacactttcacaggatcacactgcctgctaagtggagagcaaagtgtacatggacagtagcatgatccagagccagtttgaaggccgagaaacaacccatgaagggcaagtgtgctttgtataggggactggtagagactgtgaggtgaagtgaattctgaggcatttttgcaacaggacttgccagggttgtagggcagagtcaaggttaatggcagtacttagtgtccaagcaataaggaagaccccactgccttttgcagagatgggcaggctggtgggataggtggtggtggtgttgagccagggccttgagctgtgtggagtgtgaaaatctcactggggaagtagaaacacggagtaacagactctgtgaggagtcgcagttcaatcagtaaataccatgtgatccagcagtttccacagcacccatgtacccaagaggatgaagaccaggggctaaaacaagtatttgtacactgtgtccatatcagtgtcattcgtggtagttcagagctagaagtatccaagtgtccgtcagagaatgaatggaaagccaaagtactgagttcccataccagggaatacaagaagactctgaccgagatggcatgtggatgaaccttgaggacaccgggataagtgaattgaagcagtgacaaagggcaggcgccgtaggatcacatgtggtgtcaagagtaggcaaagttacagacataaaatcgagtgggtggagaatacggcatctaaagcagggaagaggcgggagctgtttagtgggtacagagtttctgtcttgtaagatggaaagagctaggtcgggcttagtttcgtggatctgaatacagagtgccactgagccacagacattacgttttaaatgtttattttgtgtgtgcatgtgtgtctatgtgagcatatgaatatgaatacaccccatgcacacagaggccaggagaaagacatcagctccctgagagctggagtcgggtgtttacaagaccactagcttgctaaaggtgctggggtgtgagctctgcttctgacggttgggcagcaggtgctcttaaccatgaaccagctctccagcctcaggactgtttggcctgcatgcatgcagtacccatagaggccagaagagggcattggatcccgtggaacgaagttacagacgcttgttagctgtcctgtggggtgctgggaaatgaacccgggacctctgcaagaacaatatgtgtttttaaccaccgagccatctctccaacccctcatggctgcatttttatgttgcttttttttttttttttaagacaatttaggttctagctcccgtgggaagaatcatgataggcttttcgaaggtttcttctgtttgacagagtattggttgaaggagggcagctgaaattgcaaccaaaggtggcattatgcattcagaagagtctcaaggaacagttttgcaagcaacagtgatgctggactctaaaggaaagggtggagggattgagccagttagtgtggaagttggagacaagtttatctcccagaacacggaggcaccaaagtagctctagaccacagggttatttcttacttagacatggtgacattcttggaaagtatgtggacagaaatcactgttgaaatggcatctcaagaagctgcctattcctgatgttctgagctacttcaccatgagaataatttccatgcctccctttttgtgataaactgaaacctaaaaataagataaaagacaattttaaaagaagacacagtccaccaagctgttcattgccattgttatttgaaaggatggcaaaaaagagagaggtgaaatgtccatccccacccagcctggactcctgcccccacagcctctgtcagccaagcatgagcacatcctgcagaatggtgaggctgtgtaggctgcccggggccacagactggctccacttcccccaggtcaggagcagcaattgtgagtattccctgaggtgtgtccctttgctctttccgtagctgccatggtgtggacagtgggcatggcaaagctggatccctcctctcagggagcactgcagctcccctatgacccagaaatgggtgagtatggggctcacagccttgactcaggggaaaccctcatcagaaccccacttggcctgagagagagagcaccttctgtgggttaaggttcagaatagcagtcacattatctgacagccagactttgatgcctgtcttagagcaagtgacagctggactgtccatcctatggccagcttttcacctcacttttgctggatgttgttgggggggggggcatgggagggtgctgaggaatcttctggattttggtagcttctgacatgccttcatctctccctgccacgcgcccccatggtgtgtgatgacggtggtcctttcttcctgggtgtttagaagaagactcctatgacagttttggggagccctcataccccgaagcctttgaagccccccttcctggctacccaggggaagagttggaagaagaggaggaaagtaaggtgcccgagtccagatggcccacttcccggggcagcggggtgggagcttccacaggtctgctgtcgccatattacagtgttctggagggtggtgacattaaacttaattaaaaatacctgtagtcagattccatgctaaagcacacagccgcctgcagccccagcagctgtggttgcccctttctcctttctcttctgaccagtggctcgcctaaattccaggcttcggcctaggctgccagtcactcggtccttgtccccgcccccatcttttcctggtctgcggtggtgctacctagggacacattcatcttgcccctttggctgggtcccttggctggtgccctggcccttctcttccatcatttttctttgttttgcctgcttcctgatgaggttactgatgaggggccactttcttttctccttatagggggcgtgaagcttggcctgggagacttcatcttctacagcgtcctggtgggcaaagcggcggcggctggcaacggagactggaacaccacactggcctgctttatcgccatcctcattgtgagtgcggtacatggtggaggggacacatctggggtcctcacagggcgtttatagctgcaggcttccctcttccgggcaaaggcaatgaagggagagctgcccaacccagagtgtggtcactgaggcatgctccctcctgagagagagagcacccggagagcgacaagaggcttcgatctcactgaccacatggacctcaccgctggggtctggatgaaacccttagttcctgggttgtgtggattgtccaagattatgggagatggaatagctgaaggcctttacctgtaggtacagccagggaggagtgtgaagggatgccctgcccagtccatggctgggtgttccctgtgccaccagcaccccatagaacactgaatcccgggttctctgacctcagcagtagtgtaacctggaggctctgatggctgctactcaagccggggacatatcctgcaatgccatcttagagaatgcttccgtttagctgttgggagagtccctgaaaggactgtcatgccttgtgctttccttgggtggaagccttgggtagggagaacagttaatgctggtgtctgtccagtgctcagggagcatggttaatgctggtgctccgtccacacactggtgctgtgtctgtctggtgctcagggaacacagttaatactggtgctctgttcagtgctcagggagcacagttaacactgatgctctatccagtgctgggggagcacagttaatgctggtgctctgttcagtgctcagggagcacagttaacactgatgctctatccagtgctgggggagcacagttaacgctggtgctctgttcagtgctcagggagcacagttaatactgatgctctatccagtgctgggggagcacagttaacactgatgctctgttcagtgctcagggagcacagttaacactgatgctctatccagtgctgggggagcacagttaacactggtgctctgttcagtgctcagggagcacagttaatactgatgctctatccagtgctgggggagcacagttaacactgatgctctgttcagtgctcagggagcacagttaatactgatgctctatccagtgctgggggagcacagttaatgctggtgctctgttcagtgctcagggagcacagttaatactgatgctctatccagtgctgggggagcacagttaacactgatgctctatccagtgctcagggaacacagttaatgctggcgctctgtccagtgcccggaaaagcttgtttatatccacacaggatgacagtcccagaatcctctcctaccatactgtctgacttgggacccattgtcccacgggcaggctgatactttggtgccttgtcctcaccctggacactaacggtggaggtagaaagggtcaccgccatgcttgcttccaaagggcaggattacatggcatctcctgtttccttggtgtctgcggctaagcaactcaggattacgatttcattttagctcatctgcattgcttgtgaatgcatgttccccagagagacactcttaccatcctgtgtgactgctgtccccagatggggatgccacgtggcctggccatgtctatatccacccttagccaacacacaggtgtcctgactaaggggggtgtgtgagagagaggacctgccgtgtgtcccttgaggggctatcacatatctagaaaagacagttgcgtgtctctctcagttcaggccagtctcggggattgctccgcccaccatggtagcgttaccgttctcctcccttgatgtcctgcagggtttgtgtctgactctcctgctgctggctgtgttcaagaaggccctgcctgccctccccatctccatcaccttcgggctcatcttctacttctccacagacaacctggtgcggcctttcatggacacgttggcttctcaccagctctacatctgacaggagacagagcgtggctctgagggctgtaggaagcttctctggatgcaggtgtatagttttccactctagtgccatatattttttaaaaaaaacaaatttttctttccttacaaaaaagaatttaaaaagtgtcgtgtttacttcgtgacgaggaaacagaagcggctctttggtgctagccgtctttcaccagactgtggcttccctggcggagcgtcggtagcaccagtgggatgctcagtgcgttcatcttcagggttgaggtcacgggtgtggagcgggttggggaggacgcaggctccacgcaggtctgttgtcctccagagttgaacagaaggatgtgtgcttcagtggggaccaggaggcatggtcaggaagggacactacgtgccatcaccctgaccagaggagaaaagccagtttgcagtcatggatgtgctttgtttgtgatgtctctgttactttagtacctttagaagctgagttctgttcttatgacagcagtgactgctgggaagtggcttaatatcaacaccaataaatagatgctcctgttggaatgtaggtgtttggtccctttgttaacatcgactgctcgctgggtcccggggctctcagaggtggtgtgcactgtgcaccccggagggagggacctcacccgttgtcaaggagaaaggctttactgctttcccctctgcactcacttctttaactagaaagttccacagcagggtattgggaggcactggtgcagaagcctgctgggtccccacagagccttgaccatcctcagtaggttatatggggcatcagaaacgctgcaagggagttgctaaaatgctgactgtttcctttgacggatgtcttcttctgctaagagccagcaggcccagaaccaggggcctacctgggttcagagagttgctcacagtccctgcctgtggtgaaaggcaggccagctttgcccttccctgtgcgtcagcctggcacatgttgtggagtctcagaagtgcctctgggtgccgagctgcagttggtatcgttttgctgcagctgtggcaatgaaacacatagaactcacaaagggtacatgagtatactgccatttctacagtgcaagtttcaagctgagaggtttttattttaatttttcccccacaaatgaggtttttgggttttgtaccctagcactgtccttactgactggtacattcgtttctcctacccacggtggtctttttggatgttgtaccctttggactccaggtgtcctatgggtttcacttatctttctgcctcaattatgggagaaaaaacgacaaaattatatctcaaaactttctaacttcaccagcagatgggaacctgtttatggcagccaccgtcttgactgagagtgaccatgtggcctagccataggtctatccaccccaagggttactcccttccctcaacctaggcagagggacagtctagccagcttctgccaacaaatcctgctgccagacataattcagttactttttgccttttattgtttgcctctaatttcttccttcactgtgtgtgttgcacgtggcttgattgtgggacagtgtgcctctccagggcctggtcgggcccacatttcacacaaaaccctgtgtgttccacctgcagcagatctggtttcttgtcaatggcagttttaagtccactctgactctttcaatgtcctgtctgtttgctacaacatgagaatcagagatcacactctggttcttccttcttgcttttacccagtcctgtttaatatgtctgtgtgtgtgcacatggagctactgtttaaaaaatgtaagctaactctatatgcaacttaaattcaactgtgctagctgggcattggtggtgcacaactttaatcccagcacttgggagacagaggcaggtggatctctgtgagttcgaggccagcctggtctacaagagccagttccaggacagccttcaaagccacagagaaaccctgtctcggaaaaaaaaaaaaaattcaactgtgctaaatctcaaatattttaagttgacataaatttttaacttatttatttttattttatgtacattggtggtgtgcctacatgtatgtctgtgtgagggtgtcagatcttggagttacagacagttgtgagttgccatgtgggtgctaggaattgaacccaggtcctctggaagctcagtcagtgctcttaactgctgagccatctctccggcccccattgatatacatttttaaataatgataaaatttaaggttataaaaatctattccaaattaacaaaatatttataccacccagtccttccggtaagctatttacaaaggttaagcgtctattacaaaaggggatttttctctgcttctttgtcctatctaagttaaaaccagttagagtcaggctggaggagggctctgagttaaacatctctctacagcctctcagcttggatccagttctccagacagatcctgctctaatgtcgttgtagccatactaagtacaggttaattaattagagggataaagccttgctgggcattggtggtgcacacctttaatcccagcacttgggaggcagaggcaggtggatctctgtgagctcaaggcctgcctggtttacagagtacagagcaagttccaacacagcctccaaaccaaaccaaaaaaaaaaaaaaaaaaaaaagccttacttagccacctatgtgcttaaggcaagtaactaaagacaaattctgtctgctgagatatattaaacagagccctcaaatgctcagagatctagagactatggcatttaaaatgttttattaaaaagcttttcatgacagacaggctgttagaccacgaccgcggtcaccccaatcaccaggcagattcgaaagcttgctgaaaactgcatgaggttttattgttttttaatgagctaaccccatgttagctcgggtctttcacccacccgccatgacggatggctcgaaaaagacagtttgaactggctgccaagagatctcgtagggcagcgtaaggggagtatctaggggtacacacagtctcaggattggtgtgcctccaggcttggagggcttgccatgtgttgattggtcaactggttgttagggcccataggccctcccagggtggttgctatgctctgttcgtcattgctgtgcgcttatccataaagtacatccagggtcgtaaagcatagcgccaccagctaacttctgattgattccttgtcacgaggcaggcacctaacctctagtgactaagacaaggtcatagcgagcacatgttactgtcatggctgccgaaatggggggctggtcccttcaaggccaactgctggcgctaccccatttcttccaagaagactggtgggcactcaagaaactccatccacaaaagttgtaatgctacccactgagcaattctgcctttcacctcatctgctgcaaaggactctttggaccatgggcaagaggacagaagaatcgacttcctccatgttgcttgggccaatagtaggcaagtcttcctacagctcctaatccacagatcccacgctatcagcaaaaggtgggcatccttacagcctctgatctcaacaaccgtggaggactctggggctggctgtccatgtgaccagctagtaagtctctgttattccctaatcatcaattcaggtaaaatcttatacctctcaagaactctgatgcagtttgacagctgataggtttcagtataacttcttaccattcctttgtttaaaaagatgtttttaaggtataaagtttatgtaagaacataaaaacttaagatgatgaatctaaaaatgttttaaggtaaactaacttaaggtatacaaatacaagttatcagatttctttctcattatgctactgtacatagtcttaacattaatcaataaagttttttgtttgttttgagacagggtttgtaagaacaaaacacctggatgaccctaaccccgccccctaacaagcgggtactcactcacccaccatgcctttcgacctttgccctactgcgcatatgcaattttccctttaaaaggtcctgccccacacccctcaccctctttctctcggcttccctagggttggctgactgcccatcccctctttcccccctctctgataaataaactccacgtgggttgcttattcgttgttcctttccttattagcagctgcagcttaaacaaaagaacaacagggtttccctgtggaagataaacattcccatggctctggggtgaaacttctaaagagaagactggataaatgttttcatcttagcagcttaaagagatgttgatgaaagagctagctggggatgctggggacaggccacactcaggcgaaagtggaagtagaggtgtgtccctaccaccgtgtaaacacactgacaccaagggagtgaggcatgcttggttcctgaagggcacagtggttcccagctcagactaggtgttgggaaaacacacatctgttagcaaagggaaggatcatgggagaaaaaggaaagctctctgagtcaacctgatgtcctcccagcaggaggcctttcctgcctggaagccatccttttggatagactcaaaaccctactaaacccatttctggttttatttagaagttaacccctccctgctctttctttgactattttcttttactctaaatgtgtttttctttggggggatgtctacgtttgtttttctcatctctactgactctgcgtcactcagtgtgatcctgtccactcacacgaccacccccccttcttcttgcctcccccagtttctagtcttcctcactggcaggaccctcacgtgtccggcatgcttgctttatgttactcactgcctcaagcccagcactgtggaaatttgactcagctctggctggggggtgggggtggggagaactaagccggattccaggggtgagtccttctgagaagctgctctcttgatgtaaaagggggaaagagtgccctcaatggtgatctgtctgtgccttcttactttcttcttcgagggacacaaacaattatgttgtgagatgtcacagcctttttgtgacggtgaagttaagtgcctccggcaaagtgcacatagcagagaaggaaattacaaggaggctggggacttaatgacctgcttgagcagctgccccagcttcccacagccttgttacattataaaacacaaacctttctccaactaaaccattgtagtgttgtagaacatgaagttaaatgcaggtttgatataatttccaaatgtgcttctatgtcagatgaccatggctcttctactcagtgtctccatctcccttctcttgcttccaccaacaccccacatttgctcccctagtgttcaccaccccaaagtgcttgtcttaaagcttgcccacaatcttcttagtaagaagctttatttaaaaaaaaaaaaaaaaagctgtggtaagacgaccagctcaggtacacagcagaaataaaggaaaggtccatgactatgtgttgggcaggagtttgatgtaccctcatgaacatgaactttgtctcccaaatgaggaacttctcgtgcatcccagcagacaggacatcatagacacatattccctctgagggtttgtctccagcatccccactcctggtagcagatcctaccttcatttggttagaaggaattgagccatttagatgaccttgtgacaaaaactaattgcacacatgatagactgtcttttgcttataaccccaactgtcttctaagaaaaatgagtcctgtttggcttctgttgacacagggtctgaccaggctgactggagtggaatggctctgtggaataattcttacagtagagaagaaagacgagctctctttgttgtctagttttgttttgacgcaacacaagctagagctatctgaaagatgggaacttcaattgagaaaatgcctccataagatccagctgtagggcattttcttcactggcgattgatggagggcctatcccattgtgggtggtgccaaccctgggcgggtggtcctgggttctataagaaagcagattgagcaagtcacgtgaaacaagccagtaagcagcacctctccatggcctctgcatcagctcctgtctccaggatcctgccctgcttgagttcctgtcctgacttccttcaatgatggaagatgatgtggaagtgtaagccaaaaacccctttcctccctgggttgttttggtcgtgatgttttatcatagcaatggtaaccctgactaggacactttcctaatcttgggtctaatcatccaacctgcagtggtgagagtggacagggagcttatgggagtcttggtgaggacgtggttctgcctaaccatggtgctcagctcacctctgtctcctcagtctggacatctgcatctttggaattcagaagattctatttatgtcctgcttgctctcttgacattccctctcacgttaggtgtctcaacccttggaactggtgttacagatgtttgccagctgatgtgtgggtgctgggactgagtccaagtcttctgcaagagcaatcagtgctctttaaaaaaaaaattattgtgtatacagtgttctgcctgcatgtatgtctgcacaccagaagagggcaccagatctcattacagatggttgtgagccaccatgtggttgctgggaattgaactcaggtcctctggaagagcagccagtgctcttaatgctgagccatctctccagccctgcagccagtgctcttaaccatcaagacatctctccagccccattttggagtgttcttcctggcaagcagaaacttggtacccccagtcttggttcaagtctgctgctggaaatacctgcccagtttaactaagtccccctctgttgtttcgcaactcataaactcaaggagacaggaaagtgtacacagggtattggcctgcagtcaccagttcctaaaacaataagaaatcgtgggactgtggtactcagagagttcatttatttttgttttgttttgttttttgagacagggtttctttgtacctttggaggctgtcctggaacttgctcttgtagaccaggctggtctcgaactcacagagatccacctgcctctgcctcccgagtgctgggattgaaggcgtgtgccaccaacgcccggcccagagttcatttctattctactggcagccatggacagatgcccactgcaactctctgggcctcggtttcttacgtttataaagtgaagggtttaagacatattgaagatcccccaactacgggtttcaagagcccatacctagctactgagaaggctaaggtaggaagatcacaaggtcaagaccaatgtgggcatcttagtcagaagccctgacttcagtctccagcaatacttttttaaaagtatggaggaacaggtacaagccaaatagtatttcagtagttttaaaagatatgatagaactcttcaaactatttcctaatggcggcagagtctactctctagaataagacacggggcaggcatcctgcatacaactggggaatgagggcaccagacactggatgggctctgcctgctatttagtcctggccattaattcttaccatccaaggcccacatgggttaagggcagtgcccaggctagtgcagccgagggattccgtgagctgtggcctcagatgggacctgggcagatcagttctgaattgaggtcaaaagtccttcatccacacaggaacttgcttgccatctacctggtgtgttctaggcaacatggagacagagcctggtctcacagccttgggtgttgattctctgaaagatgtttccatttccagaagctcaagacagacaaaggagagttacttggatgaatgtgtgctatgctcaggttggagtaggcagggggattccagccagctctataccgcaggatggcttaacaccaggcaccaacgagttcctccaggaacaaccaggaggcggcaactacttaggaagaagaggaagaagaccagcttgattgacattcactgtgtcttctacagggcaagcttcccacattgtcatgaagcagcaagagagccattaccagatgctaaaaaaatgcaggcaccattctcttggattccctggcctcaagaaccctgggtcaggcagactttgattcttcattaattgccaggtctcaggcattttgtcatagcaatggaaaatgagttaagaaaaggcagaaaggaggatggctaactgtttgctccagtaactttcttcatttttctgtaacttaagtaccatgttgtttattgatgaaaaatagaatctcaattaatccctgttaactcagtcttgtgggttatccttttctttgtcccatatggccctatggcagcaactctgggggatgggatctaatgggtacatgtggaattcagttcacatctttcttctctctctctgccccctctctctgtctctgtctctgtctctgtctgtctctgtctctctctctcctgtgtgtgtgtgtgtgtgtgtgtgtgtgtgtgtgtgtgtgtgtgtgtgtgtgtgtgtgtaaacacaaaccacagaatgaaatcatcttcaccggttttaagtgtacagttcagcagtgctagttgcatttgtgtagttgtgaaacagagctctgaaactttcccatcttgcaaaactgaaactctgtactcagtaaacaatccccaccctctgcctcaactcccaggctcctgtacccactaacctcttagctgtttctatggttttcactactctagatccttcctatgagccgtttcatgaagtgattgtcattttgtgtctggcttctataaattagcacagtgtcctcagggtcctgtctgtgttgcagaatgtaaagagttttttgtcccttgtaaaagactgagtaatattccactgtgtacatacccttgttctttatctagtcctctactggtggacatttgggttgcatctaccttgtgagttgtgttttgctttacgtttttttccattacttactgtattggggagactgcacatgccacggtgcacgcatggcaatctcagggcaaccaatggaagtccactcttgccttctaccttgtgtgtggcaaccagctcttttacctactgaaccatgtgttgagccttatcgtgagtgggtctataatgaacacagatgcccatctatctgtttggcagccttttggatatgctcccacccccagcaatgggactgctgctcacacaatattccaactcctgtttctcatactgactgtaccagtttatactctcacctgcactcctggcattcccgatttctctatatcccggccaacactctttagcctgtttggttgacaatggccatcctaataggtatgaggtatctcttggtcactttgactgttttggatttgaacatcttttcatatgcttttaggctgtttgtgtcttctttagggaaatatctactcaagtcctttgtccatttctccccaatagttaatgctttttatttaggatctgccactcagaatggtcacattctaatcactttgatgttttgctgggatgacttgaagaactcagcattgggcatgctgtcgtatttggtgttacatagcacagggggacagaaatgtgaccccagaaatgcttcagcacagagaggagctgttccctgggtcttgaggtagtggagacagaagagggttagagaaccccacctccatcatgggggggggtgtttcagaagaaggactacagtacggtgggtgccgtgtgggacagctgcctccagacggcaaagaagaggagctgttacagggtgacgcatggccagccagttggcagctaagggggtatcggtggcctttggatcaggcagaggtttcagtatcatggtgatcagggataaaagcagctcagcccgggccagtccctttcctcctcacacagccttcctgttgagaaaggcgtgatggggtcaccattcaagttgccaccccgatgcagaaagtgccaggtcacatatctctgggccatgagattcttcattgtcatgcagccccacggtcagaaatgtttcaatagctgtgtccttggggacaaggtcattgctaaattcatgtcactggtcactatgtggagcagggtagtaaggatatggtcagtatgttgttggatcctatgccctgtggtatctgcatgaagcttccatcccacgcgtccctcagggtcttccatgttggctatgccctcttgtagtctgccaggggcatgaccccacatggcagtgtctccatctctcctccacactcatcattcctggtgggcatctgctttcagtattgtgtcatgctgtcctttgtgcttctcgttacaatttaaagatttcttcttacatttaacatatgtgtgtgggggggtagcacaggcacatgccacacacagcacatggccaggacaagaaacttgcatttacagtttatggttgggatcttatatttggatctttaatccaattagagttaatgtttctttttttttatggagaaaaagtgaggactccactgcattctttagcaaatgaaaaatctacttttcttatcgccattcattgaagaagcagtctttcttattgagtggatgtggctctcttgtgggagattgtttgattattgtgctggctagtcttaatgccaacttgacacaagctggacttttctgaaaggagggaacctcaattgagaaatgcctccataagatccagctgtaaggcattttcttaattagtgactaatgggggagggcccagcccgtggtgggtggaccacccctgggcaggtggtccccagtgatatgagaaagcaagctgagcgtccagtaagcaacactcccccatggcctctgcatcagcttctgcctccagattcctgccctgattgagctgctgtcctgactcccttggatgatcaatggtgatagggaagtgtaagccaaataaacgctttcctctctaagtttctttgtccatggtgccttatcactgcaatacaaccctaactaggacaggagtgcactgactttctgtgtaggccaatttggctggtacggtcttttaacactattaagtcttctaatccatgacctcaggatgcatttttacttatccatgccatcttttatttctcctagcaattttctgtggtttttggtatgcaagtagttcctctctttggttaggttttcatccctatgtattctatttttttcaatcctgtcccacacagtatttttttaagatccttcccaaattgtttattgtctgcctgctcttgcctcaggatctataccatatcccttttatctgactgtaggacctttagtttatgcttcccccaacctatctgctgactactgggcccattatatggatgtagggcaggctctgcttactgggcctacaggagactcacgggactcttctccagcctccctgtggccatttctgttcttgagtacatgatggagggctgacaaggacctctgtagcctgtagttcccagagtcttgggcaggataaacaggctctctctattgcctgaggttctactggcccattagatagaagcctggtgagtgagaagaacgccgtggttctaaagtcctgagacctagaactgtacctcattctgcccatgtcttactcccccacccaacagcacaggggtcaaactcatatcccttctggggagtcacagtgtcagccagtatctcacctagttcttttctggttttggagggatgggttgaggtgcagttggcaagggggagagttgggacagggtgtcatacagcccaggctgaccgcacattttagaggtcaggatgactttaatctccagatcttcctgtctctacctcttcaatgccagggttatgtgcatatgccatcatgctggctgttacccaggtcttgctgtcccacatctaaagtccattaaagaaaaacaactggcaggctctgctcttcatgctggaagcttccctttggagtcaagccacctggggtactgcccagcctcagtgtgggtgagttgtgctaaagggaggttgggacatggcagttctttccccagctgcagtgagtcttactcttgtgtggtctgggcagcctccctgcctgggtccctctgctccaggcttacgactgcctgagtaccagatgacctgatagaagaaacccgagtccactcaatacctggcttaaactctacagcaatagcttccaaagtgtgattcaaggggtctgggaggtgagatgatgccaattatattatgtgacattggattccccttctccttctctcaccagtgtacacagattttccaggagctgtgtgatgcaggacatcgcgaaggactgaatgctgacaggagcacagctctaagtctgttctgctctattagaaataattactttggaccattggcgtggttcggtgggtaaaggtacttgctgccaagcctgataacgggagattgatccctggaaccctaataatgagagtagaggactgagtctcgtaagttgttctctgatctttacacatgggcacacacatgcacgggcacacacacaataagtgtggttggagagatggctcacttgttaagagcactgtcccttcctccagaggactccagtttgattatgaatgcgcgcgcgtgcacacacacacacacacacacacacacacacacacacacacacacacagagcagcttacaaccatctgtccctcactccagtcctaggggatctagtgccttcctctttggacataaggcatgtacacagtacacagacatacattcaggcaaaacacccatatacatagaattaagatgaaagagtgctgttttatccacaggacctgggtttggttcccaggacacacatggcagctcacaactaccaggaaccctaacttctggggatctcacactgtcttctggactctttgggcacctacattcatgtggtatgcacataagaagcaataaatgaatctttaaaaaattgcaaagctgtaactaaatgccattctttacactcaagttttttcaaaactattttgacaaaaaccattgtttatgttaacatggtgcttattaatttaaaggaatgaatgcatcatttaaaaaattctgacttacagtttctgctagattagaatttcagcccaccaaatgggtttctagagtccttagaaacgtttacccatatgagatgtcgtgagaccagtatgttcgagggctgctgtccctaagaaggctgctgtgctcatggagggctttgaagtcctgctggccttcactcctttgtgtctttgctgactttacaacagcatgccacaggagggcagcagatcacgctgtgagccccacaggccttcaccccaggggcgtcactaagtcagttggctgcctccagcttcttccggtatctggcccaggcactggacaaagtcataatccaggtaggtccttgctctgtgggagacttagccctggtttcctacccatacccctggagaaagcattggaatattggtccaggctcacgcaagagcctggccactttgctggagatatttggggaagccacactagctcagtgtgacagagtgggtcacagggagtttctagtctcagctttgacatggaagttttggttcttgtgggaactgtcttctggaagagcaccctgaaccactcattgtttaatagcgtagcgggcagcatgtttcccaccattctgacagttcctgggatcaacaatttaggaggaagaaggcttcttctggattgtggtttcaggggctttggtccatggttgctgtctttgttgctctggggcttgtgactgtgcagtacatcacggcaggaacatgggtactgatgggagaaccctattcacctcgtggccaccagcaacatgcttcaccttcaagcattagaataggcaggtcactactgtgccatgaggtgacacatttgagcagaagagtctacagtctgaaagttggtagcaaacagatttatctagaaagaatcttgacccatggttctcagcctgtgggttgtaacccctttggaggtcaaatgaccctttcacagggatggcatatcagatactctgctatcagatatttatattatgattcataaaagtagcaaattacagttatgaagcagtaacaaaaataattttatggtttgtgtgtgtgtgtgtgtgggggggcggtcaccacaacatgaggaactggattcaagggtcgcagcattaggaaagtggagaaccactgcttttaacatatcatcggggccgtgaggtgggggaggagagagggagtgcaggcgttctgcttgccttgatacccaggcttgggggaaggtagaaggagagggcacaggtgaaattttacccataaccagggcctcacgttggcatcagagcaagtcatgggaatctctaacaatggaaagcaaggcttgtcagctacttactgcagtcttttagcttccctttagacttcttcaaacagccttaaagcaatgcagtgtgggtgagctgcctcaaatgtgggccagtagaaaataaagtcaccagataagggtccaaaccccacattgccagggtccatgctctttctccattactggaattccagcccccacatatttctcccttccatttagatattcactgtcaggtttggtcaacccaatgatagatacaaatccctagtctttgcttatgtaggcctggtgaccaagataaactaggctttgaaggtcaaggcaaggttatggtccttctcctaccatgtggaaactgtagtcttgggcaaggtgcctgacttctctgagtctctatttcctccgctgccagaggcaataatatcagtgagttgtgagaatcacatagcataaggcatctcagagattaaatcagcgcttggatggtagcaagggctcaacaggctatgcccagcacagaatttgaaacgaacttctattttgagacagggtttcatgtagtcagtctagtctggccttgaccttgccacatagctgaggatgactttgaattcttattcttctgctttcacccactaagtgctaggattacaggtaagtaccatcataactatttttatgcagtgctgagggactgaatctaggactgttgtgcacaccaggcaagtattttaccaatatatgtctctagtcccaagcttagccattttgaaaaatgtactgtttttacatattgtcactatgttgtacaatagctgtcttgtactagctcctcctgtgggttttggatcctttgccccccacccccatctcagcccctgctaactaaccctctgctttctgcctctcttaatccagcctgtttagattccacacataagcaaggtcatctggtatttttctttttgtgcctggctcacttaattcaatgtctcccaggcttagctatgttataataaatcataatatttccttcttattaaggttattttttaaggattttgcattatatgtatgtcccatgtttcttcatccattaatccactgatgggcacttaggttgtgtacatttcttggctgttgggaacaggttgtgatgaacatgaaagagctttagagagacaattcattttctttagatatattctctgttgggggacttttggatcacacagtagttcttttgaatgctttccttttttgttggtgctgtttcataaacctccttaggtgcgagtgtgtgcacaaattgtggtgtgtttgaggagggtggagaacaatcctggtagtaggcccttgccttccacctcatgtgagacagggtctcagctgtttgttgtgggtatggtaactggtccacgagctcccagggatgctcctgtccccaccttctgtcacaccttatgattacaatcatgcactgtgctcagctttatgtgggctctgggatttgaacttgggtccttgagcttgcatggcaaatgcttttacccactgagccctctccccaacccatcatgaatattcccttgcatcattaaacattctactgaagtcacttcaaaggctgcattgtagtttattatgccaatgactgacaacttttgtaaccatcttttactactgtacttttagtttaacacctttactgctatcaataaatacagaaccaacttctttttatgaaaagtaactttgttcatattttgtggggggtccctgcaaatgctacgtctggcagagaaacgatccatgagagtcaaggaggaagtctagttcagcattagtaagttaacaggctggttcacacttctagagcttattttagccatatttaagcacagcactatgttaggaaaatgtttcctggtgacaacaactcagtccagtgtgtacgataaagcttaagacatgtttacattgaaactctttacaaagtccatatcacttctttcgtgaagatgggtactgttgactcagaaacaatgctcagggtaagggtctctggagaatgacggaggtgaacacaatgactgtgggagtcaggcttggccagggtgaagcctggccctacagatagcaaaagatcaccagggtgtaaactgtatccattcccagcaatcctagaagaagacaggtagatatcttcttccttggaagggacaagcatatgtgtttaacttccctgctttccctagtgcttatctgtgtgcgtaagaacctgtatcctttaaaatactttaaattatttgcttaggataagcttagtaagaatatggatattgttaaagctaactcttttaaaaggagggaacaaaggctgtctggattacatgctggctcttagcggtcagttttcatgtttccgaatattcaaatccatccatttaatcatctctttagcccactcccttgttaatgtctaactcaccagtgcatactatttagattcagattttgtcgtctttttgacaatcaagatgacagtgcaggcctcttcagccttctagcggcatttctgcttaccgaggtttcttccaggtaaagtttaacttactctgaccccactcagtatccttggataccctggtcaaaatactaagggattctggacagcaaagtgctttcttatgatctcttcagaaccaaaattgttgtttaactttctcccctggttatcatttctttctccctaatcagggaatctaagggagtctgcaggaaactgttagctactgcacaaattagtatatttttctgctatatggatacacatagagctggctgtgtaattgcaattctggtggagcaatggcaaatgaggtgaatgccgctaccaggtttggctgttgagccccctgtggaataacgtggaatggaggtgatgcccatgacagccttggaagtcacaagagactatgccacaccctttctcagccaggctggaagaagagcaccctgctgaccattcaactcagaggtgtggatttggcgtgatttccccccagagggttttgtactagaagttcatcccttgtgtggtgacgtggaaaggctatggggtctttagtaggcagagcctagtggcaggtgattaggtcattgagagccccatctacagaaaagattaatactcatcttatggaatacattagttctcccaagaatgagttgttacaaaagaacccctgcctgctccctcatccgttggctccccactttgcattgcatgtggccacttttgtaggggatggcattcaccatgaggccatcactggagactggattaataggccattcagtcttggactctcagactctagaaatgtgagttaaacatctcttctttgtggaataggaacaaaaaggggttaggctataacttgcttttgtatttgattacagaactatttttctctgattacaaagaaggatcatctgtaatttacagccacagttggttctgtgcaagccatatttccttttatcttgactcacgagattagttgtgaaccccacttctccaaatttcccttccttcccaattcttagggcagcattggagtgttccagacttgcacgtgatggtggcctctcacttccaccttcccaacagattgccctggtggtgagaactgaacccaaggaagcatgtctctccatcgtttcctctgttttctgagacttggaatcattttgcaagaatttagtggaaaacacatgtaaagaatgtggttgaatctgaatagttgagtttggcagaagaatagtagaggaataattggatctacagaacaaagtgagaaatttggagttctggaggcatttgagggggtttggctaaagagagatgggaacaggagaacaagcaaggctgcttcttgatgggaaccagtgtacaaagcatcttcataggatgggataaggaacatagaggtgcagtctggacccttgtgctcttttgaagggaccagcacagccctggataggggtagcgcccagttagtaagatagtcatatgccagttcacagcttcagggctcaagagccaggggcgatgatgatggaaggctattcccttcttttgcctcggcctgcctccaggaaccagctggccttgggaggactttagacatctgctgggagtttgaaccaatttttttttttagaaggctccagttggcatatgatgtatcacacacacatggtaaaagaatactgcagatcttgtcaaataagttagcagtggagtaaacaggttccttaaaacattctgagggcaagagagtcacacggtatacctcaggacacagtatggataccaggctgtgctctgttctcagcctctctggctcccgggcccttgcctgggatgagggaacagctgctctggtggaggccaggatggttcctcacccactgtctgtcttctagtaccaggcactcagagaagcccctccctgaagcttccacagtgccctgtgggtacatcaatgactgattctgtcaacgctctaaggtcacaggaatgtatgtgggagacagatttcgcacagtaaggggaaacataggagacgtgagttcgttaagaagttcttccattgccataaagatgcactaacagatacaatttaatgcaaaaagcatgttgtttatctagtgttagaaggtttgctttgttcccaacaaagattttaactccaaaccagaaaaacaaatgaacaaaaatagggtaacagtggactagccatgcagctgtggcaggggacgggtgggcttgcctggccctctgtttcctttttttcaagatacagagtcctgttgctgcactgaccagggcaggtttcctgagtgcaaagcaccaacatgccaactcttgagataaaatgtcgtaaatagacctagagtctgacccagagccaggctcagtgtccttgggctggttgtactcatgggccaggtcccaggtgggggtggggtgaacaactggtgtggaaatttccatgagctgtccaccagctctggggaagctctggtgttccacatggcatggggaggacatgggttatgaaagaggcacaagacatggtcccagctcataaggaacaaggcccctggagaacgcttgccaagaaagcaagggacaaataggttgcaaaaccttaaatcacaattgtcaataaggtcaaggcatggagccaatcacaaaagagtcatcatcaccttccatcagaactccattccacttcctacagaaaatactggaaatacaaactgaatattaagggtattttcctcttttataaaatttaggccctgtgtgtgtgtgtgtgtgtgtgtgtgtgtgtgtgtgtgtgtgtgtgtgtgcatgtgtgtgtgatgtgtaaaaccaccaaccttgccctgatgttgtactcatgctgtggtttgttgagagttttgaccccagtgtggcacctttatgagatggggcctagtgggaagcccttagttcattgaaggagctgcatccaggagggactaatgtagctcccatgagacactgagatttcttgagaatgggttgttttgagcctggccactttctctccggttttctatttggacaatatactggttggtttttgtcaacttgacataaacctagacttatttgggaggagggactcttcattgagaaaatgtttccatgagattggccgataggcaagttgaggtcttgtcctgatcggtttgatacaggagggtccaatccactgtaggtgatgccattgctgggcaagtggtccagtcttgtatgagaaagcaggctgaatgaatcatgggagcaagccagtcagcaccacactcctccacagtctctgcttcagttcctgcctctagtttcctgcctggagttcctgtcctggcttctttcaagtttgggctgtgattaggaagtgtgagcctaataaatcctttccccctgaagtcgcttttggtcatggtgtttagcatagcaatagaaacctaagacagacatggtttctttgacctatttggtttcaccaaggtgcaatcttctgatagaccctcactgaaccaatggggctaccaaatcttaagctcaaactatataattttcaacacactagttacacaccatgaacaggatttgtgagttctcatggatgaaaagttaaaatgcctaggttaggctcctcatatattctaactagggctccacctctatttctttctgtgtctttcctccatcctgaaggacttggtgggtgaatgcctttttgggctgggtaattggtaattgccatatagctccaaacagcaactagagctacaactactctaggggagagacatgctctagcttccattgagtagaaatgttgatcttcgctctaactggaccagtcatagtgggcctgccacatgcggactggttgaggtttaaacacctgtcttctcagcaagactttgaaactgtcttccactgtgagagactaccctaggagccaccagtcagactgaccatggctacagatggagtagagatcttagatattcccaataaggactacaccttggtaataattaaagggatattttctaggtacaaggtactatagggaatataaagacatgccatttctagtctattaggtgcaaaaggtattaggtgcaaaaggactcgttgaaaactactcacacaatgatgtcaggtacaatgtgagaaggagccagtaaatgctgcgacaaagtaccgtgacatccagtgtcactgattaagaggttttaagcaaataacattggaattaggtcctagagaatgagtgttataaggattcaggcactaagctgaccccatcccctgtcaactgtctgggtacacaccggcattcaggcagttacttagctcaaagagccctgggttgcatggctatgtcatgtgttacgtgactgcataaggactctaggcatgtgcaagctttcccttttaggcgaatgcctcccacctgtttgccccttccatctctgttcttggttggtacatacccctccctttgctccctttctccaaggaagttttgttgagtgggttttgttgagttttgtggtttgtctttcattgcccgaagctgcagcaaacaacaatgagctggtatatgattgtaagtgagaaagaaggatggggttgggcttgaggagcaaagtggcattcccagttagtgggagcttctgctaacgaaagtgatgttaccctaagggttacccaagtgaccaggatgacccaagtcaaggtgaaggtgagaacagatatttgttcctttgcctgaccagtaggaagcacagttcctccacgcatgccctacagaatcctgctaggaatggggacaggctgtcccttgcaggtagaggccactgctcccaccagtctggtgttggtatgagtcttcagaggctcttcagggagggctgagctaactctggtcacttagaacttgatcaagagtgttgctcattgcagtctaggcttaccatctcagctctgcactctaggtggactctccactactcagtggtggcatccccagggactgtggaaagagtgcaacaatgtaagactgtggtaagatggggtatcctcccaggagcagcatccctgccccctctctctgagagtccacctagagtgcagagctgagatggtaaccctagacctgaggtgagcaacactcttgaccaagttctaagtgattccagcatgaggagtcaaggaggttcctcacatccagcaataagacagcttgcttccccttctgcaggcacacttcatgtgtcttgcttggcccccagtattcctagaggtggaggcaactacactatctgaggggctttatcatgacaagggcccctgtctaacacttctctctttggtgtcaagaaagaaaaggtctagagtctgaggaacactctgttctgcccaggcttgtgagccatgccttagtcaggatcactgacatcacctgaggaagccgggccgccctgtgctcctctgtccaacagtcacattcagttttagcctcctcatccttagcaaaaacagcgtccttggttagtcctcagctataagttgaagccctttctgtggccagtgggacctgtcttgaatttatttctggcccacggagggctctgagcatgttgtactttcagctcagcttctgatgctcactgccgacttttatgctctcttgctcagcctcccttctgtaacccggctgtgctgctcttgaaggtgtgggcagatggctacgaatttggctctgtccatggtgtccagcctctagcatgtttgctgattgtctagtttgcaacttggggcccaaatctggaaatggttccaaaacttgtgctaaattttgtgaatttaaaacaaacaaaaacaaattaaaacaaatttaaaacaaaaaaacaaaacctttttacttagtactacacagttgcaggaggacagagcaaatatgtattcagtgacggggtggctccccccaaatgagaagggccaaaggcatgatgccgagtcatagattcctttcaagctgatcactacttcctaattcataccatagttattttcccataaatggtatcagcatagaacagctcctggcatgagttggaggagagggctggagagagggacagaaggggctgtttggaaagacaaactactccttctacttcttcttccttctcctttttccttctcttctattattattattattattattgttgttgttgttgttgttgttgttgttttgcctagggctgtagctcagtggtgatgtgttgcctggcatacacaggccttcagtccatcaccagcaccacaaaaggaaacagaaaaaaacctcaaatgggaggacatgctcagacctccaccaggtaggaccttctcctccttggatctcttaaggccagcagttctcaacctgggagtcatagccctcttggggtcaaaccacccattcacaggggtcacatatcagattttctgcatatcagatatttacattatgattcataacagtagcaaaattacagttatgaagtagaaacaaaaataatcttacagaggaaagtgagtgcaacatgaggaactggattaaagggtcgcagcccaggaaggttgagaatcactgctttccctgcctgctttcccaggaggctgatggcctcaccatgccactcacaggagagcctcgattttctcctcccaggccttcccaagacctaacctgtcttcaccagaactttctgcagattgtgccgctgcccagcccaggggatcagccctgacaaatgctgccctcatcctcattcagagaaatttctcttttcattgactgtcggtggatgcggaggcttgtggctacacaaggtgcagagaataaatggtggtgggtgcttaactctaaaaaagacatgtaggccttctcttcgaaggttcgggggaacattgcatagaggggcttgggaagaaccttagagctggaagatagggagcaggcttgagaaatgccatcttctaggcaagacatagctgctgcagtcatgaactgacaacatctatgcatgtctgcactgaaaccatgagttcacagcatctatgcctgcctgccctgcagtcatgaactcacagcatctatgcatgccttgtattgcaaccatgaactcacagcatgtatgcatgcctgcaatgattctgcacaagcactggctggtcagcatgggtggggaggagacgctcaggggaccctacacctagtgcagaactagatgccacagatagaagcagagaggcagggagtcattgcctttagttgtgtgcctactggttaccccaacaggtgccattggacagatccatttgtcacacagaagactttggttaaattaaatgggccacaaaataaaaccaaaagtcatggatcttggagagggacaggtaggagaagggaagggttgggagggaggaactgtagggtggggaaacaatcagactatatcttatacatgcatgaaattgtcaaacaacaaatgtagaaaaaaaaacccttcaatttcatgatcaagaagcaaggactcacgacttatgggaatatcattttaaaaattaattattaggtttatgtcagtaggtggtagcacatgcctttagttccagcactcaggaggcagaggcaggcagatctctgtgagttcacagccagcctagtctaaagagtgagttccaggaaagctagggctacacagaaaaaccttgaaaaaccaaaagaaaataaaacaaagtttgtgatcatgattatatcaaaaaattatattaacactggaaagttaaatgccagtatttcacttcgtcccctttcattaatgaattaataaaacctcaaaattactaagaagtcaaaaggaaataaccaaaatcaaacttattttgattaaggtgttggtggttacatatttcatttgtaagaatttatgaggtggctgatacggtgacccaaacttttaaccacaggactctgggtcagcagcggcagactgatctctgtatgtctcaggccagccagggatgcaagagagagatctgttctaaaaaaaaaaaaaagacatagacttactatctgtgcattttgctgaatacacattctatctcaatttaaatatggaataactaagccaaagatgatgacatccttggctaatgtttatgtgatgcagttgtgctgaaaagagacagacccaccaagaaagagaagcagcctcttgaagaggtggacacatgttccacgcacaggcaaagctaattcagagaaaggcagctgtttgttggagtgtttcggttgtggggagcactgggagcctctcctgtagtatattttatgattcccagttgcgcagtcagctaattgcagtaattagtcttgcctcagttcaacagggttggatttcctcagttggtctcttaggcctggagtttggaaagtgtgatgacttcagactatgacttgcaatggtttgcctagcattcacaaggcccgagttccaccctagcacaaaaatacatgtataaaattgtattttactttaaaataactcctgccccccagataggatctgttgtcttgtgtttttttttacctctaagagttgggggtttgacaaataatcctggagttgatgaaccatggtccttagaccccaaggacagcaggagcactgtgggccctgccctgccctgtctcagtattccacttagatccaagttagtcagtttgaaaatgggtacatactccagagtaaagcactgtttatgaaagcaaaagagtaaaaaccatctgcaggacaaggagactgttaagaaaatccttgtttgggcatggagagatgatggcttagtggttaagatcactggctgctcttctagaggacccagcacccacatggcagctcacaattgtctgtaattccagttccgcaggatctgataccctcacatagacatataaacaggtaaaacaccaatgcacacaaaataaaagcaaacaaatcttaaaaaaaaaacaagcaaaggaaatagaaatccaacataaaaacaaacaaaaaatcatggttcattcatagactgtaaccctgagaaaaagagtaaagacaccctatacattgattggaaaagagtttaaagctattattattatttaaaaattattttaaaatttttatttatgtgtacatatatgtgcctatgtgtatttcccacatgtacaggtgccagggaagtcagaagatggcattggatcctctggagctgaagttataggcagttgtgagccacctgactagggtgctgggaaccaaacttaggtcctcggaaagagcgagtgtttgtaaccatggcaccatctctccagacctttattttttaaaaagtgtgtatatgtgtatgtgtgtgcacattcatgcatgaatatacatgctaaggaggcaaaggcatcgacccctctaagaactggggtgacaggtggttgtaagtcactcaacatgggttctgagaactgaacttgaggtctctgcaagagtggtggagacttctcgactactgagccatttctccaagacctaaagctattatttaaaattaaaagaatgtttatgtctatggttttgtttttacttgaatgtatgtgaaccacatgaatgcctgatacctgtgttagtcagaacacagcagatcccctgaatctggagtttaggacaattgtgagccccagtgtaggcgctggaaccaatccttaggtcctccgcaagagcagcaagtgttcttaaccactgagccatctctccagcccctaaagctgttacttttaaatgaaaaacaaaaagaaagaaaagtctgggtatggtcacacactttcaatcccagcacttgatagtcagaggcaggaggatcttgaggccaacctggtctatagaatgagttctaagacaaccaggtctacatagagaaatcttctctagaacaaaaacaacaacacagaagttgactagaacactatgtctgtgcgtgtaatacatttgtctttacttatgtatttgaagtcctttagagaaggaacaagagactttaagtagtggtaacgtttgtgtaggaggttgccagtatgagggagaatttgggaagcagggaaggcaataggagacacttctcacagaaagtggcttttgtttagttcttgttttattttgtcttatttgatccattgcctgtgagtcgtacgtgttgggaattataggtatgcaccaccaaacctggccacaataaatatttaaaaataaattgtttagccgggtattggtggcacacacctttaatcccaacactcgggaggcagaggcaggaggatctctttgagttccagtccagcctggtctacagagcgagtgccaggacaggctccaaagctacacagagaaaccctgtctcgaaaaaccaaaaaaattgtttataaattaagtgaatattacctaatgaaggagtaagataaatttatcaaaaaaattcaaaatttttttaataaataaggcaagttttagggcagaagggagttctgtgattatttcatcaagcattctcaggcagtttgtattggtcaaggtatactgaaaattttcatttatctctttgtccagaaatagaatcttgtccattttgtattgcagagtctaggattcaggactgtgtgcatgataaagttctgggccacagaggcagaccccagtcctggaatcggttttaattcctgttggattaagagagttaaagagttattaaataaccgttgttcctgtaatacagatcccctgagagctctggggccatggagaacaggtgtcctggctgtgactcaggctgtgactcaggccacactgggctgctggtccctcggaacagctcctcctgggctagcactggttttgagcatgaggcagacttgtttataattttagctgcatgttgacatggcagaaggcccagaaatccaagggaaccctgattctgagtaggactaggcaatagggagtctgacatttatgatctggcaaatgtgcctcaagacttttttctccaggtctggaagttatgattgaaaactatgttcttccagcttaaagagacggttgccggttgctcccagtaggtaggaattgacttaccaagcattataagctaggactgtactttgacttattgataaaaaaataaaagatgaggccagtcagtggtggcacatgtctttaatcccaacactcagaaggtagaggaaggtggatctctatgagttcaaggccagcctggtctacagaggtagttccaggacagacaaggcaacacagaaaaaccctgtgtcatccccctaagatgaaatcactaagtaaatgagttgaaaacaaaaaaacaaaacaaaacaaatgcaagtgagtaaatgaattgatgacaaaaccccttctcagctgtttctagggagcagtgacattgagataatggaaaagttcttcaggtatgatagccaagaaattagatgaaattacagaattattagacctttttaaatttaattttgtcatttcaaggtctctttagacatataaaaagaacttttgcaaaatctggatagtaatgcagtatctctttgaatacatggtatgacttagaatgctgggttatcatcattaagtaaaattatattaatatatactatgtgacaggcacagagtgtcttaagcacttgagcatgaggcagacttgtttataattttggctgcatgtgtccattcacttaattctcaatgacctattagatatgggtactagtgtagggagctgcagaaaaccgcacccaaaagatggcgccggtttccgccttccgccagcccgacggcgagcactctctgtggtaaacaactccaaatatggtaaaggtcatgtatcctcttaattctgcttggagacaacctatcctggcgcgccacgtagggttaggtgattggtagatgtagactatatcaagccccgtctccctcggcccggggccgccgccgcggccgccaccgcggcagcctccattaagcaaagaggttcccgattaaactgtgtctgaagaagattcctcagtgtggcgtctttcttgctggtcaagggcggacgccgcaagtggtggcccgtacggggacgccgccaccgccgcaagtggtggcccgtaagtacggggaatcagaacttctcacagtcgggagtaagttcccaaggtaagtggaactgtaaagtccgcggtgaatgcggagataggtctccggtaaaggagcaccaaggtcctcgggaaagaggcgataaagtctccggaaaggagcaacactgttcgtgacaaaagcgaaccgaaagtaaaaaacctcgcttctgctttaatttgcagagtgagagtaagttaatggaccccgctattatagtggtgatttggctgccttttaacatcgcagcctcaggcaatctcactgtggctagttgggataagcttggaaaagatctagattttgcctgggcacagggaatgctgaagccagggacgaggcctatttggaaaatggttcgcagctgtctagaggatcaaagatgccgcaaggctgtagaagaggggcaggagacgttagaacagctgaaggaaataaatagatgcaagtcatggggcctgtgcagcgcggtttactgttgctgtcagccctacccaatcatgaagaacctgatttgtgatgtgtgcaggatagtgttaggtttgcttttactttaccttctattctccataccattatatgagtgggtggttttaccccagggtatggccaatagccccactatgtgtcagctttttgtgtgtcatgctattgctcctattagagagaaataccctgctgtgagatgtgtccactatatggatgacattctcttaactagtaaggagttgaaattgctgcacttagcatatggagattgtattggatatccaatctacccttaatgctcaattgaaaggtggcattatggttttgaatcaacacattgatctattgcaggaacaattggatactttatggtaactggcacagttgggatgtgaatggagaatgcctggtttgtgtataacagctgtttcctatcagaattattccttagcagcaaatatgtctaaacaaccttcatagtatcttctaggcaactggtctggggattttgacaagctgatgcaggagctgagactctccatagtgcatgtgaattccaccagggtcgacatcttggttgcggaaggactgtctgcgtggatcactcaagccatgaatcatctgaaagagtgggcaggaatgggtgccctgggaggaatgcttatcctagttagtttcatagcgttatggtgtatctgcaggatgagggtcacacagcagagaagtaataccatgattgcacaagcctttagtttagttaaggaatgggctggagtaggggttatgttttccatgatgctgttagccatttttgtttgcttgtggtgcctatgcaggatcaggaagtcgcaaaaatcccaagctgctatgttggtacaggcctttgctgctgtggaagcaggacagtcccctcaagcatggttatccatgctgacagacaaatagatgtctgtctcgcccttgctgagtgagtgatgcgtatctgaatcagtcatgctcaatgacgggcacctaccctcatgctgagcgaataagcatacatgtgttcccttcaacctaagacatgagcctgtgagggcgacacagtgactctttgacgggtaagatagggacactggggttgaacctaagacagagatgactgaaatctgacaacagatagatactgctactcctataatattaaaacaaaaagggggaactgtagggagctgcagaaaactgcacccaaaagatggcgccggtttccgccttccgccagcccgacggcgagcactctctgtggtaaacaactccaaatatggtaaaggtcatgtatcctcttaattctgcttggagacaacctatcctggcgcgccacgtagggttaggtgattggtagatgtagactatatcaagcccgtctccctcggcccggggccgccgccgcggccgccaccgcggcagcctccattaagcaaagaggttcccgattaaactgtgttgaagaagattcctcagtgtggcgtctttcttgctggtcaagggcggacgccgcaagtatgtcccgcgcgctctgtatttctcgccagcaagaaatcatacacgggacactcggatccttctgcaggaaagctttaatgcgtcttgagaggagagcataagcttaccagagcggagacactgagccaagaatcccgtcccctaataaaggctggcagccgccgcctgggacgtgtcaccctatgattggctgtagctcatccggccatatgacgccacggaataggcagagatcaaggaatggaaaattacccagcgcctgcgcaataatcttgtttacattcggtgcctgccggatgcaggcgccatcttgtaatggagaatgcagggacggctccctacatactagtgttacataggggaactgaggcacaaaaagtttaattagttcagggtcatacactaagagggtgagttgggattcttccccagactgctgtcatggttgaacaccttcagtttgccagcaactgtgccgggtgctggagatgcaatggtgaaccagagaaagcttttgctctcatggaactgacttacattccagataaccaaacgaatacatccagtgataaaaagcaccagggacagacagaaagaaaataagatcaaggagtggtgagttcccttactaccgaagggtcaggtcgggctcctttcagtagaacaccacactgacatattgtgagtttggatgtaaaacattcgactgacccacgaggaagttccagacaggagagccagtgaagtctctgagctgagactgttcctcacgcctcagagcatttaattggagtggagtgagaaaggcggggtgggggagggagttgaagacagacctgaaagatacccaggggtatggtcatactgagtcttgtagagcaatgtggggtcttggggctttattctgagtgagatgagaagtcagagcagtgagggaatttaaaaagggattgtctgcctattgctttagaatgaaacaaaggatcactgtaggagggcgtgagtaaacagaggaccggtgagctgcctaatgatgtaggtgctaaatgatgttgccttagcttagggcagtggtgacgctgaggtaagaattggttgactcagcagtcattttggagatggactggaagagtttgtgcttggatctgatgtgaggtgaggtagaaacaggtgtcaaggaggaggccaaggtttgggtctcagcagtggaaggtatgactgcttctcagaagtgttgagctgctagggtcaccgcctggcctaagcagcctgaacaagctagtcttagtcaacagactaattaaacaagcaagtagtagtgcggagcagaaaagatgttttctgtgtgttcacattggtgagggaaacaaaatggtccagtggcccacgcccaggtcaatcttcagggtcccgacgtgaggtttaggtttaaatagaatgcctaggcatacatgactaagctgtcctgggcaacgtgtggtcctgttcattgtggtctcagctccagtctctcctgcgtggtgatctgacaccctgtcaggactgtgtgaaaccttccagaagacaaccctccccacactccccagctgacaccagccttcacccctttccttccccagcatagactcctggggaaattccagcttcttggggtccattgtttccatagattgacagtcacagggagatgaacgggcatctttgtagaatgtcttcattactaggagggtcacagaagcaggagaagatgacgctcaagggctaagccaaataactgtctttagaaggtggcaaaatggcaaagacatgaacattctgccctccacagagataatgcagatgctggcaaagactgaatactcttttctttagaactctgacaacgaacaggaggtttgccgcaacctggagaatagttagtgaagaaaaagggctgcgttttagaacttttcagcttgctccggtcttagccctctcacttccaccagctacatggaagtcttgaaaatgacagcctgcattcctgggatagccattttgctaccatcacagggagcaaaatggagccagaaatataaactcctcctcaaagaactgccattcttttagcatctggttgtttctggaggaccctttaaaaaggctgtctatttgatccaacttaaattctctgttgtaggaagtctatttcttagaaggcttttgtcaacaaaacaatgcttcaggcatctcctttaacttgtttggctgttttaggtagtttgggcaaacaacagactaaccaaaagcttgaaaggagattcaggggaatgaaatatccacatattcctgggagcactaacaaccatgcatgtggttgggccatgttatggtcaggaacaactggagaaggcctttggatttcacctctgagtgacccagtgattgtgcaagcaggaagttaggttaaggcagagctgtcaactttttggctgagtgttgaaggcatgcttcaacaagcgtccagtggcttggcgcaggtgatttactggttccaggcatttaagaaaatctgtctgtctttttacctgattagtaagctaagtagagacctttggtagtcactcatgagaagaaaatacagactttacatattagttctgaaaagttattaaacaacaactataaaaagcagcaatgacagatcctggaaaaagggggaatctgatttccaaaaatgtcatgttgtgttaagatatcctgtttttaacagaaacacaagacacacaaagctacaaggacaaacagcctatactcagaggaaatataaaggatattgggctaattatgcaaaatccttaaatcatttatttcaaatatattcaaagagctgattggagcatgtctataaagaaccaaaaatataagaatggtaccccacaaaatagagataaagaaatgataagaataataaatgcttcagagtcgaaaaattaagtaaagtgaccagcgaagctggactgcacatgtgagccggcagagaaagacacagcccacctggaggcaaggccactgaaattacccagcttgaaaagtgaaggaaaatgattagagcttcaaaactctggggtaacatcaggcatacaaatatacacagtgggagtcttagagaaataaaactgacagaaataataaagaaatcatgacagagaacatcccaattttgatcaaaatgacaatctgcatgcatgaagcctgcattttaaagaaacagaaaatcctcaatctaaccaacttaaaaccggaaaaggtttattttggctcacagttttggagggtcaagccctggcctgttaggctgctgctttgggggccccccaggaggcagcatgtcatggtagaatggtatagtgggccgaactgctcaccccatggtagtggtcccaggtccccatatcccccataaagtcacaaccccaatgatgtaacttcctcccattaggccacacttctaaacattccacaacctccccatagcagtctcttgggagcaagcctttaataaatgggttttgagaaaaaagcattcaagatccaagctatcaaagcttgatcagaggggttttgagaagaatgaaggagaaagtagtagatgaagtaagaacaaagaattctttcattttttaaaaaatgggaacagagaaaggcagatgagggtgaagagcaagagacatttcaagaggtgtgtatgctcagagacatggttcagcagagtggaaaaactgtgtgtcttctgtctctgccactaaagaagtattttttaaaatattttttatttgaattagaaacaagattgctttacatgacaatcccagttccctctccctcccgtcctcccctaccacccccccaactaaaaccctacctgtctcgtatcctttctcctataaagaagtagttttgagaccacagataaggtgttgcatcgtgagtcttctcggcatctctggctgtaggtagaatatatgtgtacatgtgtatatatatgcatatttgtttcaatgtgtatgcattactacataatacctcattaatctatcatgcccattagagagaagacacacaaagagaaaagttttcagagtttaaagataaacagaggaaaaaaaatcactaattaagatgggaatcccaccagcattaaggcacagtagaactcggaataaatacctaggaatgaaatccatgcttcatagtgtttgttgtttttgcagatttttaattatgtggctgtcttcttaccagcaattgtagcaatactcggtctgatgatgtagtgaggtggacaaggaagtataataatgactaattttcttgttattcatccaaccctgatgtcctgctgtcattattagggttatcttcaatctatgctttctttgaaaaaatattttttctaatgagtcaaaaatttttatttgttcacttcttccatttgaagtactcttggatgatgtttttggcctaagtgtctcctccacgatggtgttgcgttatgggtgaagctgagggaaggtttccctggtgtgtgccatgttctgctcctctctcctctggcaaaggaaggactcacccaaacctcattcaagagatttattgggagggaagaatccaggagcgtggctgccctctgccagggtgcaaggaggcagctggtcaaccacagctgaacagacacagggtttatatagggcttcttatgggcagagtttttccagggagatttccagggtggggactggtcagatttcaatccctaaactcagattggctacatctcgtgctcagggattggttggttttctgctcaaggtcggggcaaatttggcaatgctttcagggtcgaattgtttctttcactggtcctttttagccctttagctctagttttagggccagggtgtatttctttcactggccctgattccagggacaaagcgtgtttctgtggcactggtttcagggtcagggtgcgtttctttggttctggttgcagggccaaagtgtgtttctttggctgacccttttccctacagtgcccagaacaagcaaacacagttagtgtaaagacagagctggggatggggtggggaccttggtgtcagcgccatcgatttcgaggaacctgggaagaccttgccacatggcaacaaaaggcctcgtctaggctctggtcccctgcggtggcacctgaacttctgaggccttcccgccaaggcctctaggaggatgacctagcgtcagtattgaggtgacggaacgtggtcgccgtgtggacgcgtgccaatcaccagcagaacgcacgcgtgcgtgcaacagcagcacggctttcccaacccgggagaaagggcagccaacagacggagaagggagcgatgccctctagggcggcctctcattggctgctgtcgtcccaccctcagtccctattggctgcgagccgcgcacgcgcgccaagcacgctcccaccgcgtcctgtggccttggggccgctaacggaggcgcagccaatgggagagcccggaggcggggcaggcggagcggggcgtgcgcacgcgggcccgaaggtaaacagagtcgagcgtgtgcggggcgctcgcaccgctgcagcgcgcggaggcgtcgcggagctgacggaggagcctgccttcctgcagccgggtaaggctgccgcctgccggcccgctgctaccctcagcaccccggggtccgtccttacatgttcaagcgacaacgcggcctgaggttgcgagtttcccctgcagccggggcgccgtggccaggcaggggtgcagccgtttcccgtcccgcgtccgcgtttgcagctgagggttccgggaggcacccggagcccgctcgccccggagcccgctcgcccggcctctgcgcccgtccacgcacgtggctgccttcctcgtaataatgttccctgaactcccagatcatcgcagtgtgcgtgcaccgggctctggttgcagtttgtgtcaggactacgacttctgtgccccagccagctcttggggttcgcagctagatctagggtgaagtcgaggaaggcgtccctcccttgttccttttcttcgctttttgctccttcctcttgtttttccagacactggtggtcactcgagccgtttggagcgaattccctcgttctcttgcacagaggctgccacatcactcagacaggcccacggttctaagcgtgagggagggggcagagaacgctgcaggggcgggtgtgggtgctgggaccctttactggcaggggcttcctgaaggggcagaggctgtgtgcacactcccagtttgggttgggttgcagcctgatagaacattgctccatgcgctcttgggcttggtatctgtggggcaggactctggagctaggggtgccaggccgaccaccttgcccgaggagttggattagtgaccacgccagtcttctagttgtgctgtgggtagtgggtcatgctggcaggaaggctgttcggggacttggatcgaggaaggcccttctggaaagaggctagaggagtttgttgtctcacaagagcagcatccattaagactcagaggatagctttggcttatggtatttaaccttgctaatagtgaaggcagctgatcatttttgaatcaagactcaaaggaaaaattaagcaggcaacctggacattctctctgggccagtgaatcatgcaagacagagcttcccaacgccagacccttaatattttggatccgtaagggtttactgtgcctgcttgtattgtgccttgtaggatgtgtagcagaattcctggcttgtatctgctaaacaaatagtgatcccctcaccccaccaattgtgacaattgaaaatatctgcagacattgccagataccactgaagagcagagtggattgatctacataggcaagactccagacagggtcatcccctgctgccagcagtctttctgcaacctgcctacaagtagttgagaaatttaggacagtgtgaaccaggctggaaacaagtgctggaagccacgtggacggggctttgaaggagaaagcataagcgtacagggtggtacaggtgaaaccttccacaggatggttggaagaagaaaccctgggcgtttgtgctggataaatgtgattggatagattgaaagtataaagatgtggaaaactggtcgtttctcccctaggaacattgggagacttggtgggagagcacaggaaactggcataggttggttcttcattggtgagcaaacaagtggcatctatctgctttgtctgcttggacatctgtctgtcttgtaatgtggaaggagagcacacccgtgtcttcagggagtgtccagctgcacaccacacatacatgcttgtacacgtatacaggcgttctgatgcagtgtgtgcacatgtagagtttgtagaattcttttatagttgataggtatctcaaacccggtgccccatttcttcttatgcagaggaagaggctttgccttgagtctacagatttgctttcagtataacctagaatttaggtgctgaacttactgagtcctaaaatgatggctattcagaaactatgaaagatagtgcactggataaatgcatcgggaaagaaaaatatctcaagcctccactgtgaatttgcatttcttaattgatcctgtgggcatgtgtcagaattccacagcaaggggacactccaactaggaggtttctggggtgcgctttgttatccacagaaatgggtctgcaagggcagccacttcctcctaaagagagggttattattgggaagctaaacgcttggcaggataattttccattaagagccaccgacactgagtcattatctttgtcagttgaaaccagagccgtgtgcagaattagacaggaatatttaaagagttgtctcagttcgacaactggaaatagttataacattcctgttaacagtccagaactggggagaaccagtggaaagggaggtctcggggaggggtggggagctcagaggtcctgtttcttctgtaattgctcctgtgataggaatgggcgtgagggaggtggcctttgaggcaagggtgaccctagtcacaagtggtggggtcagagggaccataggactgaatatatgcaggtaggatatcgggtcagagttctagatggagaagaagttgtgtaatggtgttgtaactgaaatagaggtcagaggagcaggagaactaatctggggccgctgatacaatgttagtgtcagacatgggggccgagtgccattgcaatgatgtctttcatcccttttattaagatatcatttgcactaaattcacccattttcatacagttgaaaaaatatcacttaactacgccacagacaaaagttagaataatttcatcacccttcaaagttgtgctgtgtgccttgtagttgcttgtggtgctggcatgggtgtgcagtgtagatgtgggcaacttggctcagagagcctccctggcctgagaatggggaggccttgcctagcccatggagaggaggaagcagcctagaagacagtacccagtgggaaggcaggaagggctaggaccagcttgagctggctcagctgtggagtgtggggcaggtgaagagaggctgagcaatgaggcccaccaggagggagaggtgtagaatgtgtgaggcctacggaagtggacagtggtggcggtaggttgcagagtccccctggcttgctcttcaggcagagttggcaggagcttgcctaggtttgcttcagggaggctgggcgtgaattgtgggaatgaaagaaaaggcttttataaaaggggacagtcacaagaaggtggctgaaagagagagaggagggtctgagatggaccaagaatttgaaggtgttcatatatgattgcctgtgttctagggtagaaggagaaaagaggtctgctgcaggaggaattcctcctggactaagtatgggggggcagggtatcctgtgggaacaccaccgaaagagaaagcgctctctctctctgtctctctctgtgtgtgtgtgtgtgtgtgagagagagagagagagagagagagagagagagagagagagagacagagacagagagagagacagagacagagagacagagagacagagagaaacagacagacagagatgcagagggagtaaaagagacacacacagaaacacacacacacacacacacacacacacacacacacacacacacacacacagacagacagacagacacagacacagacacagagaaacagtttaccacagagaggtgtttctccactttctaactctaaccctgtatctcactgggcttctgaggtacatacaagccttctgcttgtaccttcgtgaggacagcatggagctgcacctcctctgctttttgatggaatgtcttgtgggtctttcctaattcttttaagcattattctctccagacctggttaaatctgaaagggccacttcagaaagagctccatgtggctccttgtcacccttctgtactccaagagtaaatagtactgtcttgatttacatatggggaaatgggggctcactggccccaggagcagaactggtgcccccaaggtcacatgtagctagctggtgtccaagctgcagctagaaaccatttgtgctgtcagtctgtcagcctgtaacgtgtgctgtccaggaagtagaggaccggctgttcactgcgctggatgatacattctggagactgttcacattaatgtcaggtgtttgtctccagtcctggcatggaggagggaggcagaacaaattgcagtagtttgcaggtggttaccatttgacagtgctcatggacatcttagttcttggagaaacttaagagcaacgtggtgactcttgctccgagaggtgttggtagccaacactgggcattgctgtggccaggtttgttgttatgtccttcttcctggcctagaatttcccgtgaatagccagggcagacttgtttcccgagccacagttgcttgctgcctccttccatcccctcttgtagacaggaatggaacgaatagaggaaagtgcctgtgtctgcagactcatcaagtcagcctgacccctgtaaaaactgcctttgaatggggctgctgctgttgccaagctggcatctatgtgctagggggtaagggaggcgaagcacataggggccattttcttgtgttctgcactggttgctggactctgtgggtgtttccaagtggctgtcagcatgctgagccacctctcctaggtagtgcctcataccacctggctaaataacccatcctggtgaggaccaggctgccctttccctgccctgcctgtttccttgactaggaagtgaaaaggtattctcaatcatctatgttctctttgctttcaccaggtctataccagggtacctgcatggtcctaatgttaataatcgcacaagctagtggttttagataatcatcgcatgccctaaatacccatgtactttcatgtgggagatctaatgtactcctctcaagtgcagatgagaaaacaggctcaaaaccaagcttatataatttaacttgtgtgtcagcagcagagccatggttcagatcagtgaccaatcactacctgaaccaaatactttttaaatacttttttttttgagataggattttgctatgtagttcttgacggtctcaaactcatgattctcccaccccagcctccagagtagtgtggaattagttttgctacccgggctacatctgactggggttcatggtgagcagctctgaggactggcttcttgtctccggcaggctgaccagccagtgtggctctctggggtttgactactgtcctatcgtcaacaggggctttgtgaggctcggggaggagtgatgtgcacccctgtctacctgcatgtgtcttccagccggcacccgtgctctaagatcatcctcagtgtctgcctgccaggaactggctaagagaatctaggaacgtgcaggaatgaggcattacaaggaagcagacttacaagagctcactctgtaggctgacagtggtttttctgtgtacggtgaggaggagaggaatgcccgtggttaacagttgcagctggagaggatctacacagggagttggcacctgacacccccacctcctcacactcctgagcatgcgttaccttcctctaggtaatccagtaaagggtggtctccagcccctggagaccctggtcaggttcatttctggacatcgggagatgagcttggcggggtggaaatccttgtccaggtaccatcctcacggcctgttgggatatagtctggtgacctctctctatatcttggaagtattggagtctacagttcaactttataaaaatagcggtatttttatcagagttaagatctgagttgatgccttaacaaactaggctcagccattcctctatggtaataagccagtttaaaagtcggaaaaggagacttcttcactgtggccatgttaagaagtggtccagtgataacccagcctgcatgcccctgatcatcactggggttctcacatgagggtaggatttaaatggaagacaagagctatgtatacttaagctgtcccggttacggtgtggttctgcccatcactgactgaccacagtctggggtccacactcctgcaacaagggctgacaagttgcaaataatctttgagagagaagtttcccctgtggctggcccagttttagccactttcttttcttgatgtgaaattcctgggagagttgtaaatcatcggagttcattgtttccacagtggtgatagctgcagtggtgggcacaactgcctcttttagaatctcctcatttttccaggcatgctggttaggctacatatggccccacagtcttgatttgcttacccttctacccctgcccggacttgaaggacactagtcattcatgtctttcgtgttgagaaaatatggtcacagtacttgtgacgtgattctaaattaggaattccaggggctttgtgtgcagagtcggcactcactagctgtttctgccttttgatgaagggccagtggggaggcagagcctgtgccaagtgatttttttctcaccaccttattccctaaggtaagatgcccacaggctatgtgcctggcagccagttaagggccgatgtcttctgaacagggctaaccaagggctcagagaggtgttatttatagccttttgatctgccctatgacctactgtccattttaccctgggcaggcactagagggatatggaatagttttttgaaagtacatatttgtgtgcttacttaaaacagtttttcaacaatatatttaaggtttttttccccacagatttaatattattcaaatactacatgttctctgtagaaaattgaaggaaacataaatcaatttcagaacaatctaacaacccattacccagaggaaaacgtcattcttttaaaaggtatttctttttcctccatgggaacatgcaatatactcttacttgtcaacaaatgctttcttttttaagtgtcatttaaattgccacatcaccccatcctacgcatatactattactcactgtgccgactgtgtttgtcaacttgattcaaatctagacttatctgggaatcttaattgagaaaatacccccctgggattggcctgtaggcaagtctgttctggtattgttttggttgctgattgatggaggagcctccagtccactgtgctcagtgccacccctgggccggtggtcctcctgccttgtataagaaagcaggctgagcagatcgggaggagatagccaggaaacagaatccctcctcggcttctgcttcagttcctgatccagctcccttcccttcttgagtccatgccttggcgtccctcagtggtgggctgtgatcggaggtataagccaaataaatccttcctccccaagtcgccagtcatggtttctttaacacagcactagaaagtgactaggatgcctggctaacctgtttccagtagtgcggtggctcccattcctagaactcaactaccacacatccactttgaagaaatgtagttcgagggatttgggcaggatttttgggtcattttcagacagaatgcctggggaggagaaggggacagagacttcctggtgtgggcccctgggtggggtgtaggggcctgtggaagcagagggagacaaacactggcagaggcctgggtggtgaagcctgttgcttgctgatgggagcagcagaagtcctttctctcccattgttttcccttttctagtatgtagtagtaagttgcctttgaaagctggtggcactttgggacattgcttgccctgcagacagaggcctggggttaggtgaccaaggtgcatgactgacagacagtcttggatgtgtgatttctaaaagtccatagtgattcatggagtttggttctcagtttgtttactccaatgcattcctattcctgagtccttggaagaaacagtcttttagttttcccttttttgtcagaaaaggaaaatgttaaggatgtaataggaccattcagttcccatggagggttgatcatgcccaaaatcaaaaagaaagttcatcactggaaaggggcgtaagaccatgtcactgccccataagaccatgtcactgccccataagaccatgccactgccccacaagaccatgtcactaccccataagaccatgtcactaccccataagaccatgtcactaccccataagaccatgtcactaccccacaagaccatgtcactgccccgtaaaaccatgccactgccccataagaccatgtcactaccccataagaccatttcactaccctgtaagaccatgtcactgccccgtaagaccatgtcactgccccataagaccatgtcactgccccgtaagaccatgtcactgccccacaagaccatgttactgccccataagaccatgtcactgccccgtaagaccatgtcactaccccacaagaccatatcactgccccacaagaccatgtcactgccccacaagaccatgttactgccccataagaccatgtcactgtcccataagaccatgtcactaccccataagaccatgttactaccccataagaccatgtcactaccccataagaccatgtcactgccccacgggacctccccgaggtctttagtggtccttgataaagaatgcgtgctgtgacagtcttgagagttcttggtgattggcactgtgggtcatcgtctttgagtactgtcccgttgggtttctttcttcagggtctgggaagaaatcatggaaaaaggaggagcaactgaaggtttttgcatagtggcaaaggcaggctttgggagacaggagcaggtggaaacttgagaaatgtctctctgtggggctccctcgtagccttggacaccagtcatccctgttcctttccctccttttctggagggacgagggctctgaagatcggcagtgccattggcacatggcaccttgctggaaacacagaagcccctggtatggccaactgtctcttagccctccagttacttctgcttcagatcagtccccaagagcttttgaaacttttgattaacatttgtgggtcaaagctgtgaccagctttgagccaattttgcaaatgccaggctttcttaagctttagagggactagctagattcttttcattggctatgtatttttcactgtaggacacagcttggtgctggagggacagaatggcatgcagaaagatagaagtgcttcttgtctgtgattaacagcctctagtgagatagttcactagacaaattcagagggcatgatcatggcttcagtggcatgcagggcacaggagtctggacagatgcccctgaggagggaggtgatgccttcaagagggtctcccatgatgctcaggaatggtgtaaccttctgggacacagtcagtggagggaacataagaagcctaaggctggcaaggctgaggagagggctaggccaggggggctctttctgcatcttagggatctcagagaagccatgaggtgtgggaatactttgacaggacattttaaaaaaagaaactgctctgcctggcagcctgggagtgcatgggcaggccagagtgatgagtatggctgttatgtggggctagggtctcaaggttgactttagacatgccaagcttcaagtgtctaagggaccctgaggatgtatgtgcactagtagactcatggtgcctgtttggataagtcttctcagggctgagggcttcctttgcattttgttgtttaggcgtttatcccagccattccaagtgtttagtggcagcgatgacagggaggggtcagaggagggtaggccctgactttgagaggtgtgaataccaagcttttctgacttgggagctggtctgtgatgccctgcagttatgaaggacataggctgatgcttggtaagtcttcatacaccaccctcagcttgctctcagcccatgagaacagtgacaggttggtatgccctggctatgaacaggggcacatatggccaccttgatgccccagaggacttcttccccacctgggtctccagtgattgaaagcttggtgcttttgttagctttgggcttattggaatcgcttactgtgttcatcacatctttaaaaagaatgctggtcactttcctgctggtatgtctttatgtatttcgtccgccagctctgcatctcttgggcctgtttcttagtcctggagacttagtttgaaggcccccagtgccccagataacttcatctgggagcctgactgtaggaggtagctctggaaggttttcaggaagtttggtatatgatagtctgcaggaaaacttcccagagcttggagacttgcttctgggctaacccatgccgccttctcagtctctctgtcccaggtggaaggcttcgttcattgcagttgtcttttttgagactatctttatttactttcctgttagaaatttaacacattagggccagaagaggcatataagaaactgaattggtatccctagtaaataatttaaagagtggttgtggggggtgggtggggaagaaactgagtcaccctgttggtggtggcaggactggggcccatgtctaggctctgaggatcttattttccccttcagtaggtgcctcctttgtgtttactccagtgcttcctcggtgttggcgcctgtgttagatgtgcttgcttgctgttgtgttatgggcacatggctcggacacattgacccagggaccgcaggacaagccaggtacaacaggagaagtgactgaaagacgttagcatggtccctccctagtgtgctctccacgtgtcagtttctatcctgtcacacagcttttcctgcttggggttatgggatcttttgttcccctcagaggagagcaataactcaggaacagggtccccagaccagcagggtgctgtttcagggctggtgtagcatagggagggtcgtggggctgatagtccccacgagtgctttgataccaggacatgaaatcgtggtgctgatatggttcttgtgtgtggaaagagttcctgggttttttatgaaactgttataaattatgatgtgaacgccccctagctgagtgcctggcatgtttgattataggtcaccttgggactgtgttgaattagagacagggtctttaaggctccagacgggaaaaccagaaggagaagagctgtagagactgcttccttctgctagtcatttgctctttcgcctctgctttgattcttggaggcagggctcccttacagaaaaaactgcctgtgttgataagggtgtgaacagttggttcactttgtaccgtgggggaggcccagcacaacccctgcacgatgggtaaataatgtttacccaagggggtggccacggtccagccacagtggttttgaaatctacatgctcataaacagtaggctgtgctttttagtaataactgctgatttgagaagaggatctaccacacagtgcccagaaatctgtaagggaccttcttcccattcagatgactctggggtacagtgtgcagggcaggaattggcaccattttgaaatttcatatgacactgttgaggctcattattcttaacttattttttaattaagcattttcttttgtttatgtgtgtgtgtgtctgagtgagtatgtgtgtgtatgtgtggtgctggtcaaggttagagaggatgtcaaatcctttggagcttgagttacagacaggtagtgtgaactacccctgcccctcatgggtgttgggaactgaactctggtcctctggaagaacagcacttgctcaaactgctgagacagcttttcagccctttaatttacttagcatctttaaaagatgtattttacttttatttgtgtgtgtgtgtgtgtgtgtgtgtgtgtgtgtgtgtgtgtgtgtgtgtgtgtatgtatgcatgcatgcgtgcatgtgtgattgtatgtgtctatactacatgcatgcaggtgtccactgaggccagaggaaggtgtggaattcctggagctagagttacaggaggtcgggaagctgtctgacatgggtgcagggaagtgaactcaggtcctctggaagagcagcagcaagagctctttaactgctgaagcatctccagtctctagtttacacactttaaagatggcttatttgcaattttgaaagtaggagatgtgaattaaaaaggtttggaacgtgctaaaaaaaggtaattgttattcatagtccccaatgcaggaactaaccttttcggttcatttctctcttatgagtagggtttttgttgttgttgttttttttttttttttgcatccttgtaagaacgtgtaacttcatcttgcagtggactcatattcagggtagtcagagctggtttctgatggtccccccagctaccttgtggcagtgtgcaggacctgaaatgatttgtaaaagttaaactcttgtcagtgcagtggggcaggtaggctggaatggccccaaatcactcaccagctttgttcttgtggaagtttagtgtgtggatatagtaacttaaatggagatttcaggcagaattagtgttaagcctaaaatcaaagtccgaatgaagtaggtctaggtggctcttctgatttaatgtcagggaataggcaaggagaggttttgtaactactggggtcatggtctgtggggatttgtgtcctggttttctcgctatgatttaaaggtgatctacagtaaggcttgatttttggaatccctcaggtatagcagatggtcctgggccacaggcaggagggtgtttctggagcagatctccttcaaaatccaacaccttctccaggttctccagggccctgccggtgcttttacccctagacttcagggtagtgaacaagatgtgtcagtgtgtgtcaagggtggtggtgactgagttaggagctgcctgtttgagctccaattgaatgcggtcttaccagtcctagctgtgtggcttgtgggttttggttgtgattttattgccataaaatcagaggagtgccaagcagagacatggaaccaggcgatgcagtgtatggtcattttctctaagccataacctcatggcttagactgcagggtgagtaacttgtgaccaagcagtgcactgtcctaggtcagtgagacaggtgttggaggaggcacagagcagaccagggctgagtggtaccccatcccctaccccacaggccactgtggagtcctgggtgactttggctacttagttccttctatgactctgctttcttactgacagactggaccatggattatttataaatattaagaggtgtgtagaaggggctggagagatggctcagtggttaagggcattgactgcttttctagaggacctatgttcaattcccagcacccacatggcagctaacaactgtctgtaactcacacaaacgtacctgcaggcaaaacaccgatgcatataaaataaaagtaaataaatcaaaacgaagaagaggtgtgtagaaatgccctttccccctgtgtgccaactgctagcaatgcccaagggcaccttataaacacaccctccagtcaccagcctgttaagtgtgtttctgttactgtaacaacaattctcctttggaggttttttaaagttatgtatctctccctctccctctccctctccctctccctctccctctccctccctctcccctctctccctctccttttccctctctccctccctccctctctccctccctccctctctctctctctccctctctccctctctctctctctctgtgtgtgtgtgtgtgtgtgtgtacacgtgcgtgcgcgcgtgagtgtggatgtggatgtatgtgatacggtgctggcagaggccagaggcatcacttccctggaactgggctttctggcagctgtatgccacttgctatggatgctgggaactgaacttgggttctcagtgagagcagtaagttggagccccccacccccaatgccttggggctgagcagatcctgctggaacccttggagtgactcggggctgacatggtcagaagttgtcggtgctcctgtgtgcccttgccctctgtgcttctgtcaatgaatgtaatgaaaagatgaaatacaggtgccctatggctgctgtttgtatgtcagagtccttgctcagctcatgccttatggaagtcccctgtctgaactcctcttagggcgttctgactttcttgtccccgggatttaaagcaaaccccatgtcctttgctcactggcctgcccagctctgctgcctgccttggtcatcgtgctccttggagaggccagtgggatctctgactcttctgttgttgttgttgttgtttttctttagcttccatcatgtcaacaggacttatctgagtccataaccatgcctcaggggaagttaatgaccaactaggccaggccctactactaacactggatgctccatctcagcatctttggccctgacctacattaagaaacactttccactttggccggcagagagaagagggagcaaggaggcacagagcagaggcaggcagcaggcctccccagtgctgtgtggttgctttcccggctttgtgcatctttctgttgttctcagtgctggattgcagtgtggaagctctggtcaaggaggtcctctcatcttaggctgtgcaccagtgatttgaaagaggcaggtacccccagcgattgaggcctggggagagtcaccactgtcatgagtagacccctaggttctgcagggaactgctcgggaggggccacctttgcatcgtcacatccttttgtccagaggaaagagtacaagactgggagttggtactcatgctgaggcctggctctgccacagccctttgacgattgtgctgaggttttcaggggtgtttgtgaggcccaggtgaggaaatgcatgggtggtggtaagtgcccgggccctggtcctctccttctcttcagttcacctcaatcaaaaaggaagatgagtggaaaaagcaaactaccaacttttgccttttgctcagagtccgatggggacctgtcagtgtgtgagagatgtggtaatcccttttcctaatttggcctcttttcttccagcgctgaaggatggctgctatgttgggggatgccatcatggtggccaaaggtcttgccaagctgacccaggcagctgtggaaacccatctgcagaacttgggccttggtggggagctcatcttggcggccagggccctgcagtctaccgctgtggagcagatcagcatggtctttgggaaggtgcaggtgagaggccccttccagcagtgctgtgggtgctagtaggaagagagctagacttggagctcctgatgagacccaggaaccaggacacagacatctgacagcctgtcttattgtagacgacaccggagagcacagtggctggtgcatcctgtgtcattttagggtagggtaggacacttacgtgagaatctggctgttgtactagagtaccagactaggaagtttaaataacattagcttacttgtcacagttctggaggctggaagtccaagattagggctttagtagacttggcatctgatgagtgtagggagagatcctggatacctgtaccgctgaccatggaaggaggtgttcagacttggacatctctttcagatgagtttagggtttagatgggatagatatggttaggatgagatataggtagattatcatatcttcttgtgattcaccttagtgattattaactatagacaacttacattgctgtagattctcacatgacgtgacttacgtataacttgtacatctccattcgtcatactgtgtaaagtcttctttctatttatgatgttcagcacataatatccttaccatcttctatgtagatatgctttacatttgtttaagacattttatatatttgacacaacttagttttgtttcaaaaatcttttatttagactaaaaggggaattgtagggagagatcctggatacctgtactgcccgtttgggcgtggtcacaggtatctaggatctctccctacagataaggtcccattttctggtttcctggctctatcctcatgatggaatcaccttccatgtactagcatgctacaggttaggtttcagacatacagtacacggagaggctcatgtatagatcagcctggatcaacttcagcctttgaagactcctcctataggcaagacttgctgagcctcagccaagacccatttgttatttgctgaaggttctcccttccagggtggcagctatcatagccctagtgatagcttttccctcctggttgggatgaagtttacctttgtgccaaggtccaacctcagcatcttgtattaaggagtgtttttaagctaaagcagtgtccagatagacctagctgtaggtgtgtgtatgtgagcacatctctctgtctgtctgcctgcctgcctgcctgcctgcctgcctgcctgcgtgcgtgcgtgcgtgcgtgcgtgcgtgtgtgtgtgtgcacacgcacatgtttgttttacagagattgccctgtctctttactgtcctgtcctgctgtgatgttagggcagatcaggttcctctgtgagggtactgtggttacaacagaagtccacagacttggaggcttaaacaagcacttctcttcacggttctggataaaggtctcatgcttctctgggtatgaggctgtcccagtcccaggattcgtggcccttccctcatatgttagggtgacacagtgttcctcaccctacagatgcctttgctctgtagaagtcttcataccctgtatacttgaggtcctttaatgctgatggcagggctgtgtgcttactatgcttactcctatttctcaggctaaggtcgatgcaagactctcgatagggtagggatccttgtcctttcctagtttgctcccagctcctgtcctcctggtgttgaggtggtgggagtcctgctggggggttgtcctgtggaaagcctggaaggtgagcctgctccagtgacctaggtcactccaaaggaaggctgcatgctagacgggcctcctgcactggcgtgcgagctctctcctgacactcctccaggactttctcctgtccccaccattcctttatgtgtctagctagagtctatagcaggcagggtcaccttcccttagtcaccagagaaagaagatggattagtccactgccatggaggaggccccccttcactccttactacttgggtttggggttcctttcgtcacctgatgtctgagggatccgattgctctgggaacctgtgtgccttgctgccaggcacttattcatacatttgtccatcaggtgcataccgaggctggggccctgtcaggcacaagggtcctttgttgcctgtagggttccccagctactttaatagcagtcacataaaaccaagtgcttaacctggaagccatgggacaggaggggcctctgctccagactcttcatatgaggcctggctatatgagaagaacccagaacttctcccagtatgacttgtttcttctactctgggactttgaatggcagagcaggcccttggctctggaccctgctctgctgttgccttctggcctttcctagtcacgtcagcagtcttagtttccttttgtgaggtgagagtggcacctagtctaccacccgctgccatgggagagcaaggcttgttcttgagtcctcagagcatctcaagtagctgagtgagggagctccaggcctcccactgttgccatgtaacatgtgaatggcacgtaggacatggcatttgctcagatttcatttgaaccagaaacctggccataggcctctctctctctctttagggcacagtgctatgtaatcatagccttcaccagcagcttctggggccttggctgtaactttgtcactgactgacagcgggagccctattttcagatgtagaagtcactgagaagggtttggaacttgttcaagttcattcaaggttaaaaaatcagagtgaatctctgaattcaccctgagtttgaagtttgaacctataactttcaaaggaaacatggggtgctcactgccccctttctccatgtctcagattcacaagaacagccaggctctctgaccacctgtagcaaaaacctcttagctgcaacccagggctgacagaggagtggggtggggaagttgggggttggggtctgctgccttgaggtgtcgcagaacccagtggtctccatcttaagcttctgcaagctttcctcgccttttgtactggtttctctccttaaagccccataggcttcagtgttggccctgctttataggcgaggaactcgttgctagagttgtgtacatcttcctggccctgcttgggtgctcggtggtgtgtatagctgccagctaagatcacagtagagttctggaagaagcaggctagagctatctgatgcctcctaggttgtgaaggggacctccacaggggtcttaggcatagccttaccttcggaggggagagggggctggttggcagtcacatgcagtaccctcaccaggagttccagaccagtccttctcttcacactctcctttattctccacagggtcaagataagcatgaagatttgtatgccaccgagaactttgaagatctggaagccgaggttcagttttcaacaccacaggcagctgaaacctccctggacttctctgcaacctcttccccggaccagtccctgtcttcttccctgggtcatgcccacagtgagggcccagctcctacctacgtttccagtggacccttcagggaagcggggctgtcgggacaggccacctcccctatgggcagagtcaatgggaggctctttgtcaatacgagagacttattcttggccagtggcatccagcgaagattcttccaccaggaccagtcccctgtggggggcctcacagctgaagacattgagaaggcccggcaggccaaggctcgccctgagagcaagccacataagcagatggtgggtctgagaggcagcatagttggacctgggtggtattgacccctaatccccccccctctacgttgggatgctgtgtcttgaaggatacggcaaccttttggtacagtgctgcctgctggagttgcggccagtgggagtggagatgggggtacaggcagcatgagcctcaggttgccttgtttcatttgtcagttttgtcaattccataggtttcttttgtttttcccctccagctcagcgagcgggctcgggagaggaaggtgccagttacccggattgggcggttggccaactttggaggtgaggtggccacgttccctgtgctgcccctctcctactgccctgccctgtttgtcctggttgggtggaggtacagtggaggccactgtgcattaaggtggaagtggtttgggaatcaagccatgtgccagtattgggaagcatgtggaatgtagcccaggagctagctgttaaagggtctgggtgttcccatgggtgatgacctggtactgaattccatccccatcttggcttatccttgggcctggtgtgtggccaaatcttgccatgagctgtaacctggactactttgtgggcctttgtcagggcagcctttgcagacaggagactggccatgagtacaagctcttcactggacctgtcagctccctggatagaggactttttaccctgggtccagccatttgggggacaggtttaccaggtcccgttggtctgaagctgttagtgtgatgatattgacagaatgtggccctctgttgctgtcagttaaagccatttcactttgctagtgttggggacttcatctgtccttactgtcatgtgaacagcctttgaaatctcatacctgcgttcttttgcaaggaccttacacactgaaggtgtgtccccattgctcatctgcagaggccctgtttggaatgctggccatctgcagtgggatactctgacatgggtttctggtggtaccatttattaaggtgtagctgtccccagtaggttctccaggcaatataaatgacaaaataacagttttggtggcttattttacttattggccttggccagatggttgggtatgtaacaggtatgatgggttcatggtgctgctggtggtgagttgctcgggaggcccagacctctgtctacccttttctgggaaatacgctttcttctatgttccatctgtattggttacttttttttctttactgttgacaaaacatgacagaaacaataggtttcagagggctcagctctgctcatttgactgtttctgggcctggagtgaggcagttcatcatggtggttgaagtatgtggtaaagcaaattcttcacttggtgttgggcagaaacaggctgggaataatcgaccctcatggattcagccccatcgtggtagccgctattctgtgcactcatagaggaggggctgagcccagacctctgtcttgtatggggacatctgagcttcctgtcctataactaggtcctccatgtaaccagccagcagagggcctgttaggtcttccccgcctctggccaggtcctgaggccctgggagaagaaacctcggggtgctcccctccctcccttttgttcctcttccttttgtacctgggctgtggctcctgtcctaggaccatgacttctctggggttgagaatgctcttggatgccaggtattcttccaggagactgttaatacctagaagcaaagggcagtgcccatgtccatctgtctgctctgtgtggactttcttaacaaagtgagtgagcatgtgtgttaactaaagtggggtttggggctgagggtgtggttcagtgggtagagaccttgcctagtacacacaagactggctttcaccctgagtacaaaaaaaggggggggggtaaaagcaggaccgggtctgtggcgtatggtgcctgatagctcagtgttgtctggctgcttctgcagaggcctctttcagccttgctttgtaaacaggccccggagtttcagcaggcagagccaacagcatcaggagtggtggcttactgctcttgctgtcctgtgtgtcactgtcctgctcttgaaggactctgttgttgaaagttgttttgcttttttcttctctggtgactggaggaagtggagtgactgcttctcgggtgacccgagtacccagaagaggccccagacctggacacaggcccaccgggcctctgctttgccgagagctcgggcccggccacttcccttccttgatggcaaaaccacctttcaggatgggcactttgtagcctgcagtgtgctgttgttacaggccaggaggaaggctgccaacaggggtttcctggtcctggtgacatgtagacaagccttctagagcaggggtcacagtaggagaggcagtgctgtgtgaggtccttgggtgcagaagcagggtacctgacaggtggcaggaaattagtttccccagagccacctggctctagatgaaggctgagctgggcagggaattccaagaatcacacgacaccaggcccagtgcttgggttggagggcagttttttctgagtttgtagaactgaggaggccaagatcacaattgctggctgggtgagcttgtttttgctttctggtttgcctgctgcagggagcctgtccctcagtcggcagctcctgggcctggtgctattactgaggagtctgaggcctccttcctggaatgttccttcaggcgtttgtttagtaacagctctccccattgtagagtttgtgctttgccaagagcccagatacagccaggaacagtctgaaacagcgtgaagtccagccagggtatgtttaggagggtcccgtgttcacctggacaagctgatgacctgtgatatcatctgccttttctgtgggctcgtctcagggtgtgctctcagcaggaggactctagatgtaaagggacattggtgaaggttggtgtctaagtcggatattgtgctgggtagggtgaggaagacaggtggtggggagttaatgtttaatcaggactctagtgcccagtgccctgcagggtggcaggggtaggaggagtgttaaagagaacggcgctggtgcctgcccccaccaggcatccatgttaatgcctctatcccagggcaccatgtccctggtgggatttttgttgttgttgttcgtttgtttttgtttttccagacagagtttctctttgtggctttgtacaccaggctggcctggaactcacagagatccacctgcctctgctggggttaaaggcgtgcgccaccaccatcctggtgggctatcttaaattgtgtctctgggcattacaggaactgtgacttcttccagtttgtgtgctgtgcatgtgcctccctacaggatttcaagaccaggcacacacccacagatggaaaatgcctttaattttgataatgatgtctattttacacatactgggttaaatacattagaattcactctttgtgtttctgcttgcctttttaagtgggctgctagaaaatctaaagtcatgcatgcagttggcatgagacttattttgtcatcgctggcttgattgtttttgttgtggtgccctgacctgataatgtgagcactttaccctttggttctcttggtgacctctgaggtaggagcagctgttagagcgggcaaagtagagagtgcactgccacctagtggtagataagatatattatgaaatctgtaaaagaatatcttttaattaaaatgcatttaaaaaattatctatttgtggctttttttttttgaggaaaggcttttgtattcccagatggccttgaacagtggccgaccttctgcctctgcctcccaaatgctgggataacgggcatgtgtggctatgcccagcttaattttttttttcatgaaattagtttttcagtaaacccagtatttttctttaatgaattattgtagaaaggctggaaagcatcaggcctcactcaccctgtctctgagtggtgtgcctgtcttggacagcctttgagaagggaactcccagaaaggtgcgggtctgagacagactcctaggctctctctgcctggtctcagtcaggagggagggagagcccaaggctactgttctcattgttattgctgccagcatgggaatggagggagtagggtctgttccggctctgtgggcttcagctgggacaccccatgtttttgctgttgtggaacattctaccttttactgctagctgctttatattgctacggcgaaggcttaggaacatcaagattgctggcccctcttgcagacttaaagtggtcatcttctatggtagtgttgccaggaagtggcccagagaccatgccaaatccatcttcctttttgtgctggtccctctcgatatggagtctgtgttcccatgcgtgtgcagctgtcagaggtgatgggggaagagatgggcagactcacagaagcacttgtccagagctaagtgttgtcttcaaacctccagtgtgtactctccttacttactccctttgcacagtgctggagtaccagcaaggcctggcacactgtagcgtctgcctgctgctgaccaggcctggaggccacagcctctaagcatctgctttctaatccttccaggtctggcagtaggtctgggctttggggcattggctgaagtcgccaagaagagcctgcgtcctgagaactccacaggtgagcagggcccttcgtagaagggtgggtggccttagaggttctagcctctagcccacctctgttccaggaatggcagccaccagagactacctcatgtcccaactgcaggagcccctctcagaacatgtagtttatgtagatggtgatcctggttgagtgactgttcgtatggatagactgacttgctgtcgagattgaggattgcaggtggcttcccccgctgtcccagcccctctggcttcctctggctgcccacagccatgctgccacccaccagcgtcccaccttcatactcacttgtgtgtgcctgtccacctgcaggcctgccttctgtccctgcgctccctttctggattgtcgtctggtgcagtcagatgcacagggctccctactccctgtgggtagggatggagccagctgggacaggcccactgtgtttccttcattgaccatgacccagagagactgggaccactccattccagagactactgcctctgagacaaagatcagaccatatgattctgcctcccaggttcaggtccatcagacttgcctggaatgcaggttgagtggccatttgtacagtctagagaatgttctacatccaggcaccaccaaaacctaggagtttccagatgtggcacctaggaaggtgccacagggtgccatgtgagccccagtctgagggtaggtggctgggagttcagccagcagggccgttaggggtccagggctgatagtggatttccccaaatgtatttgaggttgtgggctgagcaccctttgccctggtcctactcaaggattgcagtctggttcaggtttctcacagcgctccttcctattctcgtgatacccaccatccatgctcttaccagcctcccaggcagcgctccactcatgggttcctcctctggaaagagggcacaggcacatccccacagaccacagtgctaggatggacacttgtgtgtccttggaaggggcctgagaacaggggatttagcatgggtatttttagtgctggtgctgaaatactttgggatgtaaagcctgtatttccctggatgagaaaccagctttcccaagagctagcactccatgttggctgctttccaccctgcctggctccaagcgcatagctggtgtccttttttagggactgtggtgatttaggcttagattacgttagccctgccagtaggtcttgaggcttcgaccagggtaagtggccttgggcagatcctgacctgctctggcctcctaatatacctaatatgctttgaccttgagaatgctgtccaggctagcaagctctgccctgggaggcctgtctcacattgggcctaccaccatgtttctggcatgtcctggctggcccagaccattctggggagaggacatgcttctagcctgtgagaatcagcccacattggggaggagatgcctaggaaagcccagttggtcagccaccatctccatgtaccaggagatgggaactcaactgaggtgtggtttgtgtgtagatggagtttccctcctttgtcttgtgctaactcccgctcccatcccagggactggcgaggacagaggagagctgcccactcttggctctgccttctgctgttgccagtgtcccttgtaggctcacttaccctgattagtcataccccagggttgtaggtaggccttggggcagctcagacctgtgtggagtgaaccctcctaccctcatatcttgtcctcctgtctccaccaaggagtgagcccaagccctcaccatgtctatcaccagagccaaccaatgagggctctgtaccctctccttcccatggaagtgctgctctgacttgtcaaaggcaggctgggctgcacctgggacaagggcagttgttgagcactctgcccctgaccttccaggcctgtggctatatgctgaagaaggtagcaaaagccctgaatgttgcagggctggccagggagagaggacagagggacctggtagcttagacccctgtttggaccttttcctaccttgtcacagggtaatttggtatgtggacagaagcaatgatgctctttggctacactgatgctggcagcaggattcatttggcactgtcagctccctggagtcatcacccagcagctgccaccaccctgtgtactggaaggggttgtttatgagccagctggctgtgccaagctgtggggcagaggggagaagtgatgcccagactatgctgtccttgacccttgaggatggagttcttactgcagctaggacccatgtggcaagtgcacagtcccttggtgccccacaggcccttcagccaggacagataggggaaaggcttggctgttgtcccctggctctcctgccacacttacccaccagtaggggaggccttcctggccttggagggtccggaagatgtacatagggacttagaatttccttgccgtttctgtggacacctacagttgtgtatgttgtctcagtgtgcccaggcatcatggtttctcccagacacccttcctaagccctgaatgtatgctggcctctcctgcccctcagggaagaaggccgtgctggattctagccccttcctgtcagaggcgaatgcagagcgtattgtgagcacgctgtgtaaggtgcgcggggctgcactgaagctgggccagatgctgagcatccagggtgagtggaggcccagccccgcaccggcctgcagacaccggcctgcagacaccggcctgcagacaccggcctgcagatagacaccggccggcagataccggcctgcagataccgagctgtgtgtaacggtggaggcccggtgggtgggtgggcgggtgggtgtgggaggggatccgctgtggcagtcttgggacatggggagggatgttcacacgagcatgtttcttgcctctgagtgggtgtcttgagaaactcaagaggttgtcttgaagttcagcatgaaagcctggccctgccaccctgctgtgctggtcactgggagctagtggaggagcttacagctcagctttgggggccagcatgtgacctcacagagaaaacagactgcactgggggaagtcttgggctccctaatagctctgaaagggaaggtgtgagagcagggcgggctaactgccttgaccaggttcagccaggagggaggtgttgggtgtgtagggtcatgaccttggggtcatgctgctgggtgtagactttctgaaagatgtggacagtaaaaacctgaagcccagtgatgctcacaccatgcccagtttggtttggtgtctggaaatgtagataaagaaacagtgggctggtagggccaaaagcaagcaggatgcagactggtgaaacacgtgagggcctgtgtgggtgtcctgcagctgctagccctcccaggacttttgaaaaacaagcacatgtggaggagaggagatggccttagttacttgtctattgctgtgataagacaccatggctaaggccacttagaggagggagattattgggagcacagtttcggaggatagagtccgtgaccaccatgctggggaacatggcaggcagacatggcaccagggcagtagctgaaagcttgaccttgaaccagagcataaaacagagagagggaggaagagcgccaactgggaatgacgtgggcttttgaaacctgaaagcccacccccaccccccacccccgtgacacatctgatgcttcccaaacagttccaccaactggggaccaagttttccactatttgagtgtatgaggccattctcttttaaaccacccacagatgagtgcatggtaaccatgcagtgccacaaaagggtcagtcagattacgatgggcaattctaattttctgagttataaaaacgttgcctccctctcaggtcatagggatgagttcaggcctcctggctgctcttctgggggcggggacttcagtgagctgtgcacaaaggctgtgtcttgccttggttggcacttgagtagtgtgcccatctcagcacagaagacccctgcccccactagagtcccagagtctggagtctgtgtgtcaggaagaggctgaggctgggtctgtcattttatctgagcttcaggtcctagggtgagggagagtcacttttggtggccctgttctacccaggagagcacactgtcactgatacctagacagtcctattggcctgtgtgcatccctccctagtggaagcatcactctgacccctcttgtcttccagacgatgccttcatcaaccctcacctggccaagatctttgagcgtgttcggcaaagtgctgacttcatgccactgaaacagatgacggtgaggtttgcaggaggtgggggaaatagcttgaccctgggatctaaggaccaagatgtggcggcaagctgggtgcatatcagggtaccccagataaccaggctgtgcacctgtcttccctggcctctttccagaaaaccctcaacaatgacctgggcccccactggagggacaagctagagtactttgaggagcggccctttgcagctgcctccatagggcaggtgcacctggcccgcatgaagggtggccgtgaagtggccatgaagatccaggtagatggccctgtgtggtgtgtgcctgccctcatgggatttcagagggtggggcctttcccatttctcctgagataccatctttctgttcttagcacctggcgctgggcaagtgtttgctaggtgaggggttgggggttggggctgtttcccagcagtcttggtgtaggatggcctttggggcctatgctggaacctggggctttttttgtgtggttagagtaaggagacatggagagcagggtggtgagatggtcaggtcatggcacccttgttttagtcttggctacaagttgctgggacgctaataggcaggacagcctgccctgctgcctccctagttaccccccttccctcttctcagtaccctggtgtggcccagagcattaacagcgatgtcaacaacctcatggctgtgctgaacatgagtaacatgcttccagaaggtcaggctgggctgcaggcccgagatggacgggtggggttatgggaatgcaggggaaagccctgcagagccctcatcccacctgatgcccctttctggcataggcctgttccctgagcacctgattgatgtgctgaggagggagcttgtccttgagtgtgactaccaacgggaagctgcctatgccaagaagttcaggtgtggctcttaggggtcctcaggaggctgaggggcaccagagtgggcaggctcctctgtttctaaggctggatggccctgggccaggtggtagccacatcctcccaactgcagagtaggtttcccccagaggactctccatttggggggctgtggagggtccagactggatgtgagccccctcttcacacagggagcttctgaaggatcaccccttcttctatgtgcctgagattgtggatgagctatgcagtccccatgtgctgaccaccgagctaataacaggcttccccctggaccaggcagaagggttgagccaggaagtccggaatgaggtaccctcaagctgtgctgagctgttgtgctgggtacctaaatggtgtgaacagaccctaagcccttcctggggaggtgggacaagggggtgatgactgactgcatccttcttttgggatgggcaaagactttggaggtcacaagctgcctgacccaggttcctaccctgtcctcagatctgctacaacattttggtgctgtgcctaagggagctgtttgagttccatgtcatgcagactgaccccaactggtccaattttttttatgaccctcagcagcacaaggtaagccccagctgaaccccatatgaaggtctcagcagagactttcgagctgagactctgcggtggtcctcctggctgctctatgctcacaagaagcatagggcagaacctcagtgttgtatctccatctgcaggtggctctcctggactttggggcaactcgggaatatgacagatccttcactgacctctacatccaggtaagaccagtgtatttcagaggccaagagccaattctggggattgaaagtgtgggagagcctcctggagctggccaaagcctgtcaggtccacctagctggctgtggatcccagttcaagggttggcaggcatacaagagggttgtgatagggcaggagcctctctgttctctccaggtcatccgggctgctgctgaccaggacagggaggcagtgctgaagaagtccatagagatgaaattcctcactggctatgaggtcaaggtaagtgaaccacccaggctcagctctctctctgtaggcatggctgtcttcccttggtacctaagtaccagctgctcttggagccctccttatgcccagcatagtgaaaactcagcactctgtaggaagggtgtagagtggagcagacggtttggcttagggtataccacttggtgccacctgcccatcctggtggcaaggaggcagggggtggcttgcttgggtgggcagagtaccccaggcctttagagcctcttcacctagcacctagcagggagctgacctgggttcacactggctgctagcatgggtgtgcacaccaagctgacctcctgcctcctgcgtgcagctggcttcatttgtccccccgtgggtgccccttgtccctccagtgctctgctggtgacagttacttctcttgtatctggcaggtgactactgctgtgtgctgggaactggggaggctcccacagcactcctcacaagagtgggatctgtagtttaactttgtaaagacaggagtgaatgctgagggagcgaaggcctctgcactgtgtctgcctggcttttgagggttggagttgtacctaataccattgtttgattaaaaccaaaaccatcctgtcactgcttctttcatgccctccagacctgagcagttgtttctaagattagaaactgtggtgggatctggggctgcagccttgtgacccgctcacctctgcccttcgtctcaatgtaggccatggaggatgcccatctggatgccatcctcatcctgggggaagcctttgcttcagaagagccttttgactttggcacccagagcaccactgagaagatccataacctgatccccgtcatgctgaagcaccgcctcatccctccaccagaggagacctactccctacaccgtaagatgggcggctctttcctcatctgctccaagctgaaggcccgcttcccctgcaagaccatgtttgaggaagcctacagtaactactgcaggatgaagtccgggctgcagtagactaggcatgggccaggctaatgaggggccatgccttccctcaggctcagccaagcagagggagggtgttgagcggaagcacctccatgagtaggaagtgagcagtgcagagaccccactattgcttctgtactgtctagacaaaaaggcaggcttcttgtgccatctcctccctgctgtggatgtccaccaggaacacggagcaaagaagactaaagccggcctagctacctttggggtctagttggccatgtagaatgaagctttgtgtgtttctggatgagcgtgtgtccttgcccattgccaccccagccggtggcctggagctagaagctcaggacagtagggcagccaccctagctgggtctcagcatggacaactgatcctttttgagagcaaagcagggctgtcactggaggagcagcgggctccagcatgttccaggagaggtagttactaccccgcaccggggatcaacacaggctctgtctgtcttatcatcagatgttcacacccatacgttcaataaagaagtgtgttggggactaccacttcctatgtgttctgtgagtcctgggaatgaggtggcctcacgtatgacttgggtggtggtctttacctgtaaaggtctctcatctagaatttacattgctcttggtggggacagaatgtgacaactcaggcagacattaagaatttctttgcatttgtgtctctgaccttaaggcttcactggcactggggattgagcctgatgtcttgcagatgtgaagcccttttacttttgagacaggatttcaacaagatattcaggcaggccttaaacttgtaaccctcctgctcagcctgccaagtaattaggaccacaagtctgagccaccaggcttcttagccattttagagaaaacaagcttgtagattgtggctacagaacagcaggcactagaggtggcattagggcttggacaggaacagtgtgctcttaaaggtcatgctaaatctgactaggggcctggctaactaccaccctgcaccaaacagctcactatgccttttaagaagttttactggtacctggtgctcttgtccatgtgtcacagaccatggaaagtttgccaagtcctactctgcacagatgccacctttgaggcccagggtgacttgtggatcttcaagattcccaatggctaggaggggtctgagtgacttcagttgcagttgtggcatttctgataaggtcacccatccttacctgtgtgccagcttcatcaactcaccaaaacgggtccaacgctcccaagaggctgtttacacagacagcaatcaagttgcttccagcttcacactagacaaccatgactctgaagtgcctgcagagtgtggcccagcagcctaaagcagtgactaagatgttcttattagaggaagggagctgaacacttccagggatttgaatgttattcttacctgagctccgagggcaacttaaaaaagtcctggatcaaaccccaggggcgagctgacctgtgtcctctgggtatataaagaagaggcccagaggagggaccagtgagccacaaactcatcttgctcttcatatagggaaagaaaaagacaaaatactcaatcctaacagttccttattttattgcagtacatcaaagtctggttaattaggtgacgccaacataaaatattggtgagaaattctttgttacatttttttactatcccaccttaaataattctgtgcaaaagaacccatgtcatagtctgttggcagacactctctcaggacatttccctcaaacatcaagggatgaaaccaaaccaaatgagtgattaagatgccaaagcagtaccttccttacacacacacacacacacacacacacacacacacactgatcagcatcatagtctaaacaaaaatgattacacccaggccatgcaaaactgtacaataatattacaatgagaaaaaaatcctaaaaatgtataaaataaatggtataaaataaaaaggcaggtcattttgttttcaatggcatcaaggctgactgactagtagggccctatgtaatgctgctgtccctgggacaggagaatgtgatgctggagcgggcaggagacactcacagcatccagcaaggctccacagggaactcagaacttgcaaagactgaaggtttcaacaaggaaagagccactggagggtgaagtgagatgctatgctgccaaaccaggttagaaaggggcagggctgggctatgtgtgcctagaaagggccagtggtctgggggtgtcacgctgttttaaggacactcatgtttgggagaggggatgtcagctaggtctactgagctcggagaagtgaattggtagtcactgccaaggctgcatggtggcctgttgcactgggagtagatgtctgctccgctgctctagcttttccttaatgatacccgaggttccacacaagccagctacttttcttagaaactgatgcggccactaagaaacaaagtgacaggagtctaacatgaaagagaccaggctgaaggaagggccggtgggaatgacaggaattttaggcattccctttaagcttggctatagcaatttgctggaaggctaaacaggccatttgttgtaatcccccttagtcttaaagctgtgctcactgggaaagaacgtgaatgactaagcacagggagtgtgcacccaaaatatatattctaagtgaagtctgctttagcaatcattgacaggaaggcttgtttttggcaataaaacaaaaccaaaaccaaaaaatgtaatatatttgcatacccaccccaaacccacataatagatgagccagaattcaagggccaatagcaaataggctggacatagcaccaagtactaacccacagacactatgccagaaatggctctgaacaccattttccatttaggtatcaattccagctgctgcacatgttcaaataccttgcatggggtagggagaatggtttcaggcagggccgcaggcctttaatttggtctttggtggccactgctctgagggatcgtggcttctgtctttccttaccctcctccacggcttctgacaggagcgctcttcatgtaaggctgggacaagtccagtaagacagtggttattaggagaaccccaccccacactctgggccagggctgctggtacaatgcctggatccatgtctgcagtgcagagtctcccagtccacagcagagctcgggtgtggatccatgactgcagtgcagaatctaccagtccacagcagagctcaggtgtggatcatgtctgcagtgcagagtctcccagtccacagcagagctcgggtggggctcactgcaatggagcgggcctgcagggaggtttcgactgagactctacaacgagactctataaacgagcactgtaagcaacaaaaattcacaactggttgtcaaagctacagaccaaaggctcagggtagagtcagttttctgcctaggaaggagagggaaggggaggggacagaggagagaggagccagtgctatcaggcaaagtgccacgttcaagcagatacaataataaggctctcaccaaactcaagatctgacccttagttttggatgtacacaaatatttttgtaacacttcttttccaaaagcaaaacaattgagattaggatgacacagtgcccacccaaaacaaaatgtgctcctgtctgagccagtggagaatccagaacatttgtcaaagctgctgtttaaaagaccctatcagaagtgcttccatcaccatcccccgcccggaactctgacctcctcctccataaggcagcacacctcagggtctggcagcacactgtgccaagtgtcagcatgacaggctggctagcaggtctggaaatctattttaggtgtggtttaaggtggggaaatagtggtttttttcaacccaaaagaggtgaaaaggaagagtggcagggcctctttactggcatggggtactgtagtttccgtcttttctatgttcttagctggtgaaacatgtgggtagagacgagttctggtctccatcttgcttccttggacaaggacagcagcacacacccagagtggaagctggctggccatctctggcagccagcacacccccaggcccacacaggccccactgtcccagcatgtgggaaggcatatttggtcaaggctgttcaagcctgtgcttctgaggtttcacatgagttagcagggagaaagaagccccttccccaggagtgtgtatgaggaagttcacaaccacccttaaccaaacaggttcctcactgggaagctgtgcccagtccagacagactcactgcaacctagggagggacaggattttgccaggaccaaaaccagctacacaaaccattctatgatcttcagaagccccgactctctccctgtgccctttatgatgggaaggttcagaagatgacagagttgtctttcattcatctgtgcgagataccaaaaaatactaaggggggaaatgttcaaatccatcattagagaaagagatgccttgggaggtgggtgtggccctggagtgacttgtgtgccacctgtggtgtccaggtcacatcccaccaatggcactgatctccaaacattccttagcctgcaggcttgaggacagacacgatggggatgggacttctgctctctctttacaaacatcacttgaggcctttgtaccctgtatctgactcagctgggaaacagacaagaaacaacacatttctttaaattaaatgagctttcttatatgtgcatcatctttcactgaacacaagatgcttccttgactatgtacattcagtatttaacttctacatttatgtatttatttaaactctgtattgtagtaaaatatgcattgttttcagtcgtgaggatttatttcctggcaacagtcgggctgacgctcatggaggctgctgggcgctacgtgaggactacggtgagaacacaacccgtctactcttagcgctgcgtctgcgcagtctgtctatggaagctacctggggggctggtgggggtggtggtgaagcgggcctggctgcggaggaatccttattgcagcagtgcggacactacgctgctgccaggcacgttgtcggggtgttgagtccctgcctgtggccactgcggtcctgggctcacggatcccagctcccgcggtctgtgctctccagggagaggctcttggtctttcggggtgaaatggggcttggggggctgctcaggttggagctgttggaagctgtggaatgccttggagaatcagagtcctgtaaaacaaggcactagtgagaagctgagggacaacagggaggactcgctaccccacccaggggcttctctgtcctcagcagacaaaccctctgtaagatgattggaggacacacacacatgacaagtgcgggggcctttcctagagcctctgggaagctgtagcttgcacccacgtgacactccttgctgacccttcagagacatacgcaaggggataggctcagcctggacaaggcactggccttaagcatgcagccgccacccacggcccatttacctctccatcatagtccctcgcaggggcgtcacttccttggtccatgcctcccgatgacaaagagccctccgagggagagggcatgggctgccgcttcgtgttgtagcttcctccagagaattccctctttagcgcactgccattctgggctgatgaccctataggacaccgtttgggaaaagctatgtatttggaagaggccacacctgtataaagtatacaggctgccaagaagacaaggcattccccagtaagggcaggaagcccagtgctgtaggttgtttctgtctcccactggctgtggactgctgctgtttggccatgtggatggagcccacagaatccctccagcgccacggcgccacctgccactgccttgggtgtccctaccctggtgccctcagcatgccatgctacagacatattgacccttcttgtaacaaatgacatttgccttgctggaagctttctaagagatgggctgcatttccagcaccagacagttacacctaggaaaacaccgcctttcagaaactcagagaaaataaaggaaacacaaggaagcactcctacttcacagccaaggagtgtctctgagagcacacccaaatgctttaacctcagagctgggacacacagcaaggcgaccagcagcactgacagcgagaagacaagaaagatcctccagagtattgtcagtgcccgtgcaaaagctctccatggtccccacaacttttttgtttttgtttaagaaaactttattttactaagtgttagtaatggtcaagggcactgtaagttacagacaggctgcttcaacattttgctgattttataaatgccttttacactaagaatgcgatatataaaaatgtcacccagtgactgccatgtctagatgtgaccacaaccacgttagtgttcaggaaggcactgagtagtggaagcccattggcagactgtcctccatggtccctcccctccctggggctaagtccctcacagcagtcaccacacttgacccctgcaaagactaccagtgctgcttctaaactggtgttctcgaaggctagtgacttagtgatcctggtggccaccggtggcccccactccctagtgctatcccctcacagcacagcaatgcccctcccctccagttatcaaagtagatactggccctgccagctctcacttgtagggagattcctttggaaatatactctttactctgacataggtctttggtctctctggactacaacctaatggaaggcagtcatttttatttgatttccctaatgcctagttgagtgttcagttgatatctctgaaaagaaaatccaaaccaccagtcttccacatctcttttcttcatgccttaaccaggttgtttctgccttccccagtctcaatttttctcccctatgcatgaggaaaaacaccttgtcttatggtttctttgagaactcactgcatggagaatggctcctggaagcagaggggtgagaacagtctgccgtacactccccgggtccctgctccagtccctcatcccaccatcgctcatgaacaacacacattttaggcacatacacacatgatctacttaaaattcatttttaattgtgtatatgtgtctttggggtatgtgcacatgagtgcaagtgcccaagaggccagaggtattgcatgcccttgagctgaagtgatgggtgaggtccctctgtatgctgtgaatatatgtttctcttattggttgacgaataaagctgtttcagccaatggacaggcaggacatagccaggcaggactaccagactaggagaattctgggaagaggaatgtagagagtgagttgtgagtgagacgccatgtggctgctgaggaagaaaaaggcccgggtattctccagtagccaagaccacgtggagacacatagattaatagttatgggctaataattaaaagagaactagctagtaacaagcctgagccattggtcaaactgtttataattaatataagcctctgtgtgtttatttgggtcatgggactggacaggacaaaacttccaactctgctggagttacagatagttgagagctacccaatgtgaaaaggcattagggccttggcaggaaagtgagacacttttaggctgtagtttgcatgctgataacactgaacctcaccccagctactctaaggtctctatcatcccaggccccatcattagccacaatcctaacaaatccaaagtccctgaaagacatgtgggtttttgtgtctttaagtgccatgaaaactcatgtgttggcaaaagctcactggagcagactggagccaatgctgggctttatgaaggctacattatcataaatggatagtgtgaatggtctggtacaatttttgttgtataaattaatatgtttgtaattctgaggaaaattaacctggttctacctattttgagtgagggtaacaggcaaacacaacatgaatactggctagtctactatagctcttgaccaggtgacctgagctatggtttaaatccaccagcagtcatctggcttccacacatacaaaggttaacacagccactgccattttcccatccagctggattttgcactgtgattggcattacatattggctcagaatgattttaggagctgacagcaagttacaatcttcagcttctgcaaatgcactgaagactcttgaaaatgctctcacatctaaggccacaccccaaggtggcacctcctctgtgcttagacaacatgcagctccctccctaaagagacagcactcatgtggtgagtgcaacggtgaacagcatgcacactggtggccccagtgattatgtcacacagtgacatcacagctgtctgtctctaggctctaaagactgtcaccttgcacaaacacaagatcttctagagacacattttctagaacagtctgtccttaggtgacttgtgactgcctatcatttctgtttctgtctctgtcccacagctcacttgtcctggggaagtcagtgcaaacccacttggtgcgaccctcaatcaagttagtgcagaggttcagcctcctacaaccacagggttgaacgtgtcccggattctccagccataggagagtggctctgagtttactgcagccttacaaaggagctcaaatcattttgactctcagaaaccatgtgagataataaatcaatgctccccctctagtctctttccccctcccccaaccttgtcttgtcagggtcccacgacacggcccagactggacacttgctattctcttgcttcagccgggtgctgcctcacccagcttgtttgctagtttgtgtttctaagttgtggggtagtttgttatgctgtacatcataatggatgtagcacaactgaactgaaaagtgcctggaaacaaaacaggtacagagataatatttaacaataaacgttaaacaataaatgtatcagggcaaccaagaatatagagtaatgagtacattttctgactgaaagtggatttagtgggcttcacttgtcttagccatcagtggctggggagtgaggaaaggctttgctggggtcccaggggtcagcatacaaaaggcatctgctgcatactcaaagctgaagccacagaccacatgtgtaacccgttacggcactacccggcccaccacaaactctatgagagtgcggctgctctgagcattaacgtacacttccattcaggtagacaaggggccctatccactctgccgggaaactgctcaactgttccaagggacacattttctttgtggtctcacctcctcagctctacttttacctccccactgtgacctcttggaaaaatcttcttcccatctgtccacttacgtgcagacaggccactgctggcactcatggagcggcctggttcagggcgggacttggtgatggagggaatactgacggaaccactgaatactgtccggctttcctgaggacgtgggttctaaaacacaagagaggcatagctatcagccggaaagacacaggttttgtgcagacaccctgccttttactctgactctccagacacaaagtgatcttgaacagaactatacagggcaggcagcaacagaggcccatctttcccaccgttggggtttgaagccctgacatgagatgactctcacctccgccaaggagtacttaccaataaacagttttatggttgtgaaaatggttaaaaatgtgttaaatggttaatgaagtggagtgcagaattacatggacatttgtagataatggaaacatctttgactagagagtatttacttaagaaacctgagtaagcccctttggaaaagtcaattaaaattatactcctgacaaaatatcttcctgacaccatgtgccatttgtatgaccataccccagttgttcagaatcttgctatctctggccacaaaacctcgcacttcacatggtagcccagtgagtagtgctgggcttccggctagatggaagtggtccagagagtgcagacacttgaatatactttctaaatcccagagtagtcaaaccacatggacatgttcctaacttttttctctacttacaatgctctctccttatgtggacatggccccaaattcctgcaaatgaggcaaagggtctagacagtctctctctctctctctccccctctctctcctctctctctctctctctctctctctctctctctctctctctctctctgtgttgtgtgtgtatacgtgtacatagtacatgtatggcaatgcatatgtggaggtcagtgggacagcacttggagttgcttccttcctgggaattgaactcaggtcatcaggcttggcagcaggctcctttggctgctgagccatctcacttcccactttgtttctacactcaacaaatcccatgatggtcaaggccactaagactaatcaaaaacacattaaccagccagcacttttctcagcactaattagttcattaaaaatgtttgctttttccttattgtcaagggaaaactcccagatggtggagtgtatgggtaatacggaaaccataaagtggccaattctgttaactcaccagacactactaacaatgtgctgtttcctgtccatattttcttttaaatccttatatatttgtggtgtgcgtgtgtgttttcctggacagggtcaggtgaaaaccttcaggcaccagtccttgcctttccacctagtttgcaacagtctctctcccattgtgttagcaaggcttgctggcacatgagcttgtgctattatgtctacttctatgggttctgaggatctggacagtggtcacagggcttgcacatcaggcttttcccagcaagtcatatcctcagcacccctatttttttttaaataaaaagtttaagtttcccccactctatcacacttctcttcactgccatagaacacaaaatgaactcaaaatgtattttgaaatgttataccagtttgcccaccctactgtttcaaaaccaatgaatctttcagcacttggtgttgaggaaatagtacccccttcttctagcaggttaagggaatcactagagaaaggcatccatatgtgcagcccatgctgactttcactctgctgtggcatgacccaggcttgctcaggatcccttagtcaatgccaatagcaactatctcacctcaaggctttatgaggttcagcaagaaaaaaaaaggcccaactgcatcaagcctttatttttcccttctcttctctttactgtttctctcctagctcaggctggtctaggtaagcctcccaaacattgatgggactaagttcatttgaatgaacttagggctttgtgcatgccaggcaattgctctctccctgagacacacagtaagccagtaggctattttttatatatttcacttaacatcctcttatctgctcctgaaacagagaaaaacagagaacactgtgggaaggtagtccttcatctagaatcaccctgccttgtgctgatccagctggctcaggttgctcaggaagcatacagttcacgactgtttccagtgttgtttccttagtcgatatgttttctttcttaaaaagatttctttttattttatggcatgtatgtctgtgtgaggatgccagatcatctcgaatgggagttatagacagttgtgagctgccatgtgggtgatgggaactaaacctaggtcctttggaaaaagcagccagtgctattaaccaattagctatctctctggcccccaatatgttatttctttacactgactaaaattatgaccaacacttcactccagcacataaaataggtactaaatatatttatcagatagatgattggattatatctgtaacccccatttcctgcttcaggcatcagattaattctgctggtaattaatgaatttcagattatagtcctctctgtagaagatactgtgctttagttcatattggtttatgtgtgtgtgtgtgtgtgtgtgtgtgtgtgtgtgtgtgtgtgtgtacgttttaaaaacacagattccactttatataattttcaaagaaagaataaaaatttttgagagcaactgaataaaatggtagcaatttttaaattaaaaaagcgtgcctgtgtgtgcacacacacgtgtgggtgcgagcatattcgtgccactgtgggtggtcagaggacaacctttgggagttggtgctctccttcactgtaggttctggggatcaaacccacgttgtcaggcttggcagtaagcatttttacccactgagccttgatgcaggccccaattctaattctttctaagctgacccatatgttaacacagctctctctgctacaatatgtcaatgatcaaacaatttaaaacaggaggcagaaataagaaagaagtaaaaaggaaatctagcagtgtgtttaaatgttcttggttgttaacaaggtctagaactggacactcacttcccagttaccatgtgactatgaactcctctccccacaaagggtgatggctctggatgtgcctgcagcactgggctttccaacacaaccgaacactgacagaaggtcaccacaaacaattcaagcaacaatgccacccaaagatgtccccaagcagaaggctggctggttagcgggtcccaattcaacattgctgttttggttcctatatcagatctgcaaagtccacgtaattctgtgtgttatatgtttaaataaaatgttttgccttatttaatttaagaaaattaaaagaattaaagacaagacagtcacaggcagaagcttagcatttgctcacacaggaacaaccttatgaaggacagcaacacgaatgagcattgccaaggggccctggagacaggaactgccagagtggagctgcacttcaaagctaagatgggttgctgttcttgtctctaaagtaagactaccctagaacaagtgactgagaataagcttccaaaatatgccagcaaccaagaatgaaaactaaaatactaaattatttagtcaaatgatagacactctactagaatataacaagaagccaacttttgggactttctagttaagactatgctgaagagtggggcatactcccactggtggacatgactcaacttagctatggtgagcggtttctctcacaggcaagtcgtgactgactacagattccttggaatatgcttcctgctgccaagcaaactaaggcagattttattacagtaattctgtcaagtaagacatttggatgccattataatttaatgttagtgacatttaaaatataaagtaattaatacaaacaaaaataagactttgagcccctaattttcttatggaaaattacattacaaatttttaaaacccatattaccattttactatttacagtttgcatggcataacccaaatattttaatatccataaaaccaactttccttcaagttcatatatgcatatattacttgataaaatagatactctgcttaacagccatttcaatgcatggccaatggcaacaaaggtgtggggatgggtgaaaggaccagcaggtgccatgcttcttcagggtgtagcagctttggtttttgttgttgttgttttaatttttcttatcttgggttttgattgcaattaaatccagatcaacaactcaaaagacttgtaaaaactgactttaactagaacttttcctgttacttacttgatatttatagcattactctggagacttttggtaggtctatggcttaagttctacccagaattttatctcatcctgaagtgaagtggttataaagagctgccagaaaattcagaaattcagggaacccttttctgtttgttttaaaagaataaaagatccagtttggggctgttttcatttcagcacggtattcagaatggaaaaataccatacttggaaaactatccaaccaagatcatactctaaagctgcttctgaattatacagaaatgccttgttcccccatatttccctcagaagaagagacaagatggactgacaaggggaggaagaggaggataatcaggagaaggcagaaaagtagttgaagcagtcgaggagggggaaagggcaatcattccccaaggtgcccttcagtggttagcaaatgcacacgtggttagtggaggttagccccagcctcagcggttcataccctcaaaatcacagagtgtggtgtaccgggggcagagcgcagggacggggggtacccagggtttatggaatcaggagagagaaactgttcagcagaattgacagtcatgtgatagatgtgctcaaagttgctcggagaggagatcagaccggagtggtgatgaggggatggataagggaaacctggctatcaaaaacaaagaaaggagaaaaagctgtaaggtcatgcgaatggatcagggtgagagataccagacaacatgcacacaaagaacaaggcagcatctccctcagaactcccagtgaaattctttctggcctcagagaattaacctctgtaatcaattactctaaacaggagatttttaaaagatcacttcatgctaacatcatccattttaccagctgagtgagtagcaggatggcttccagagatccaagagctttcaggcttcaggactttcttatgagatacaacaaaagcattgcaaaagtctaccccaaacaccaagcacaggaacagcaagagactgctaaaggacaagggaaccaaaaactgtttctaactaggaaggtacaaacctgcttcctcgggctctatggccatttctcagttctgaatttatagaccatacatacatacatacatacatacatacatacatacacgcacgcaacccaggaagcacgtcaccattgagtgcatccacagttcagtaagaaaaattgcttcttgaagaggttactgagttcagtatgctgagttcattaagaactttaagaacaggtaaaatgtactgtgctaggaatatggtgacaaacactacagtgataaattggttggagaaaaatgttcctgtatttctagcaaccactaaacaacaacaaaatccataggtaaacaaatggtgaagaagattcgaggaaatgagttctgtgtattgtctaaggctcgcatatcactttatattagctgtctatcttctctccactcacgaggatggaaatggaagggacatatctgacaggaggtaagaacgtgactcttcgcagctcttctgccctcttcatactcaagacacaggtgagtggacttcagggtatctgctacaaatgaagcagtcactcttccaaagatcccccaaaactttctcaggtcttaagtatttcacaggaacatgatagtgacttgaatacaatgagataaaaacatctagggtacatgctctttgcacagatggtaacatgattttgggacatgaaagttcttacatatgttaccagatcaatgtaattcctcttttttggaagaaggataattcataattccatttgagtggagagaacatactgaaatgagactacattcaattacaagctctctatcacacacgagcactcctacagacatgcatgtataatgtctaacagagtctgctcctagataagcatgatcccggcacaaagttaagtgttcacaaagcatacactgggtaattaaatggatggctttagagagctgggtcatagatcctctggaggtgaaatgagaaaagacatgtggaaataacaggaaacaaacagaatttggacacaggaaacttctgatgcctactatgtgtgcaaatgaagaaacagcttcataaatcatgcatattcctgaaaatgtaagtgcttatcttacacattaagaaaaattaaaggaatagaagacacatttaaaaatgactgaactggcagggagaaagaactcggtattaatctgggatggaggccaggggaggtggctgtggagctaacaaaaagcaggtgacagcatacatcccagactgagctgtctaattagaatcaacagccagcatggaagtcacagggatggagccagtggatgaatgacaaattccatctgaaaatgttttgcttaataataaaaatgctttcaacaatagtaacaaaaacacaactttctggtggacatggtgatgggtacctggtgcacctagaaggctgagacaggaggataggctcaaaggaacactatgtctcaaacaaacaaaagatttcttttaagtggtaagagagtgaagggagaaagaagtataattaggctgggtatggtggcacaggcctttgttcccagcaccctggaggcaggtgcagttgggtctctttgagtttgaagacagtttggtcttcatagagagttccaggccagtcatggctagatagtaagaccctgactaaaaacaaaacaaaacaaaacaaacaaaaaacccaaaaccaaccaaccaacaaacaaaaaaaacttaaacaaaaagaaataaagctgcgaggatacttcgaactttcttacaacatttgaactgctaatttagaatccaaggtccacgctccattgtatgtgaaggttggaaaggacttcggatgagaaacaactcttcacctggggaaaccctaggcagaataacattaaatcctgacattgttccactttaaggaaaggattacaatgtggggtacaccataattccttttacatggtaaagatgtgacaaaaactttctaggtgcaccagaatgcaatgaaagtgaaatactttaattgtaaaaggttaatatctatcaaaaccttgctactattgaactaacattgatttagctggcattctattgtgcaatgtatttgtgtgcctaaagttggttctctctccactcctcaataatgctatatcaaagattcaaaaagttcaattaaaacagtacatttgcccttgatctctcacataaaagctatgaatacagttacatttaactgtttaattcacaaaaactctctctactgaagtatgttgtgactttcacacagaaaaatgaaatagcaagaacagttacagcagaggcttggatctcaggactcggctgcgtgtgctgctaagatgagagcttgagcagtgaggactctggagcaatcgatgttaggagtgggaagaggaggcgccagagctctcattccaggtggaggttgaaaagcagaacagctcacatgcacagcagctctgatgtctaatgagcttgacttacacatatataaaggtcagccgtgatctagccgtgcacacactatatttacccaacacagctaataaaaatctggattacaaagggtcactaatatgaatcatctacactgctgtggatgccaccatcatcaccatcatcttaaagacaaatggtaagaaagcatggtcatgtgactggtatttacagacaagcacactggttgaaatgaatgtagacttttttcttttttttccccaggaaataaatgaaaaactctttttataacctaacttttacactagaatttttattacacatcacatttttatcacttctctcatttcttctaccaatggtattgctaatgagattaagacagatgtctctggaaagagattaggatcaatatttacagtcctctctgaaattgctgtgagaggaattattcctaaaattcttagcccagtttagctgctatccccactgatcaaagactcagactccattttagcagttttctggagtgtgtgccactgacattttaggagcaaagtgagcctggataatttgccaattccactagtaattttaacctcagcataatgggtctgtggatgcaatgcaatcttcatgttgttaaaatacaaccatcttcctatgttacacacttctttttacgtgtaattgtccaggaaacaagcttggatttgaacaaaggaacaagacttaatttcacagttagctgagaggtgtgactatgaatgatgaagcccatgtgggcttctgtggagaaaaacacccaagtatctactgcactgagtgaaatcttaaaagttttggcagctgcgtctgggacttgttacagaacctttcaaatatggctgtttcttccactaacaacagcaaacttttttagcaaaatggagaacttttccagggtggggaaccaatcaagaacttctgttttgggttttgatagatgtacgaattgtaagtttcttctatcagtatgccaccatgcatcttaaacagactgtggcgcactggaagaacatgttctcactgtatagcaccttctgtgaagctgtgcatggatgtaagcctatgtacacatatttccccatgcatctgccactgactcctcactccattcatattcacacccctcctcacgcctcttaccatgggcaggtcttttaggatctgtattccatctccaggacccatgtgtgctatgtggttaaaattagttgggttagaaattaatttatttctcatttctggatctcgtagcatctccctgtaaggtagaacacctgtttagacagtttttccacatttaatcaatataactttaaaaaaattaagcatactttgttttataaaaataagtatgtaattagaataacagaatatattaatagttcaattccttagactgctttgctttttaaataagatcttaagatttaggttttatttgtttaattggttcagtgctggggatcagagatactcacatgtatcaagttctgtaccactgagctctgccctctactggaaagggttcctttaacatacatcaaagaacccctgctctactttgcagatactattgagtgttatatgtgcatcttttaaaacagataacattttagaaatggttttaaatgtagctaaatatgcttgctcatggagtatagagttaatctgagttatttttttttctctcaattttctttttttaagaaaggggtcttaccctttagctcaggacatgctgacctcaagcttaaggtgattctcctgccttggcctcttgaatgctaagattacaggcatgagccaccatgcctggcttctgtacttcttaaggatatacaattagtatatgcacagatgatttatattacagttatgtgtgccaggaagaagtataactcttcatatatatacagaaataagtgaaaatatggtactttgtccactaaattcttaaaaccttgacagtatgcactaaaatggcactgggggatgcactcattagtgtaggagataagactcctgagtgttacttatgcttggcaaatactctgccaacaagccaccctccccgaccctacaattttggaccacagctgagcgacaaattttcagataccaaatctttcttctaaattgttttgagcttgtcctctgtgtgatggcaacatggacagatgctggcataagttaactgcatacctcctctgctgcatcctctcctcctcggggactcggaaggagtaacgccgcttgttgttgatacttctaaccatttgtttccgactattatctgatgtttcaggaactacaagttcatccccttctgcgagaaagaaaataatgacaccatttaaattgttaaagttctttatatctattaatctctatgacattgcaatcaattgcataatatgtacaactgtgatagttaaaagttatacattaaaacaatcagaaagcaagcaataattttcagtggagtatgtgaaaaaatgcatgctaaaatcaagaatagcttgcaaaacacattcttacttttaattataaatataatttgatagaagctacagctgtcttggtgtcagggctttgaccagccccttctcaccagtatcctcacactgttttccttctcctgcacagtagtttcagtggctccaggcctgtctgagcagctgagccatctctccaattccctttatttcattcttacaaacaatgcccccacctccctttccatagattattttctcccatctttactttctaggttctggggatgcattcctatggtctcctttgcctctacccacactgtcttcagtactttagaggtgctgtgcaatcgctagagatgggtttctgaagtccccactggagctctagcaagtgtacataatctaggttctatgctattatgggcaccgaagactatccagccgtatcctctgcacttaccaagaactccacaggaaaagaacatgtggcagagtcaaacactttgcttacacagccatataggcttaaacagatttatttgttcacagcttctctttgttgtcttgccagagtttgacagtgggtattacacatccagagtgagatatgcctgagccaaatttggactaaagcatttcatatccaaatgctttggactgacataatagttccactgaatcaatcctagtaatatattttcttacctgccatcttatttttgaaatatattaatctaatagtctccaaccctaagagatttaatgatccttcagtgtttaaaggtcggacctaaaataataaaaatgaaattagtatttcaatacaacctttaaaaattaaatcataaaagttttagtctatttattaggaatatactattaagacctttcactttggccgggcattggtggctcacgcctttaattccagtactcaggaggcagaggcagaggcaggtggatctctgtgagttcgaggccagcctggtctccagagcgagtgccaggataggctcctaagctacacagagaaaccctgtctcgaaaaaccaaaaaacctttcacttaagtcaaaatatagttctttaaaacatctcaagttaataattcttactaggaaggtaaactatgatttagtttgagcaaactaacttatcataataatagtttaaagaaattctattctgggtaaataaaatcaagcagaaatacataaaccttaaaactgatcatttaaaaaccatcagtgaccaaaaattaaactaagaaatgaacacacttactttattaattcttagcaccaaacactgaatgcccacatatctagagatgaaagtactgagagaaaaaggatcacggacaacggtgatgggggaaccagccatataaatcaatacagccagaacgctacattttaaaactcagttctaagtggattgcaggcacgcatgtaataagaaaaagtttattatgcacaaaatattgcacatagcaacaggagggagtcagaaagaataaatttggaaaaaaataaaggttgtatctttatggtcttgaagtaggaaagtttcttaagaagagaaaaaagaaaaacctaaacaacaggaataacatgttacttcagtaaaattagtaattttgttcaggaaaatacaccacaaatatgagatgtcacaaacagaaaagactgtcctgtgtgttagtaacccaagacccacataaagaagtctgaatagactaggaagaaaaaaattgcaaattcaacaagaagagcaaacatgaccaggtattgcctgtaaggaaaagtatggaggacaggcattaccacagttaactgggatatacaaaccagtacttcagagacatgcttttcactacaattcaaagaacggcatgctagggatatggggtcagaaagaacggtggaggatgatgatgtgactgtcgtttgtactgatattctggaaactagcaatactactactgtgtaaggtccaacagctggagcccctgtgccttagccatgaggctgacagtgtaatgaaacacctccacatctccactgagacagacgcagaaatgctgacaacagcaaaagttagaaataattcaaatgctgtcaaccagataatggataaacactaaagtattcacctaaaagactttttgtttgtttgtttgtttgtttgagacagggtttctctgtggctttggaggctgtcctggaactagctcttgtagaccaggctggtctcgaactctgcatgtggatgtggtgatgatggggtactgcattcttaaggaaaggagcacagctcacaatgctattcatttttcaggttacatgcttgcatattacaaaggttatatgacaaaaatgaaatagaaaactgtggccaaaccaaatttacaaatttaaggatgatatttttgttgctttatataatatagcaattttctgagggtttacactactaatacgtcttaaaattggggcatatttttgccagtggtggagcacgcctttaattccagcacttgggaggcagagatggacagatctctgtgagttccaggccagtctggtccacagagcaagttcaggacagtcagggctacacagagaaactctgtctttgatgtagtcatgccttaagctttattgtgtacatgggactagttaagtatcaccagcaaacatttttccaaattgtgctatatttaaatatacctaaaataaacttcgcagtgtcagactctcaaagtttgcaccaacaccagctactgagttgtgttgaaccaacttccttcttgctcacacagactgacactgctggccttggtggttgcagagacccccccccataggagagggagggggaagaaaagggagagtagtggggttcaggggtagtagcttaatgtacaatatatacactcttgaaatgtcctcacgcaacacagtactatgcacaatcactatttgcaatgaaaaatgtaaaaaatattaaccaatttgtcccacattttagtgttccattacctttttgagaggaagagtctgtatccattccatggagtttacatcgaagatatcaactgcattttcactataaacggagagataaggtgcgttgtaacctggggggaggaaggaaggtacagcctgctgattattgtgaactattaagccccaaatgctttaaaaggtctatcctaagcaactgtagagtggcatcttttcaaaacccaacacttattacataagactgatactgaaaacacttttgaagtgagcagaacataaatcatgatggaagaactgatagaccatagctcagattataaagcccaatacagaaagactcaatgaacacaccttgtccaataagacattccattgcattttaaagtactggacttttaaagcaattaagctgttgatgtgctctggtttagaacagataagtaaggtatgcatgatatgtgtgtcctagcacagttctgctacagacactgtgacctgctgctgtgtggcaagaacagatgctcaaaacacatttgtggaaggaatagcgacgtaagtacaggataagcgatttactcaaactatagttactgactgaattacacctagaaatgtgttagcctgatggtgacttcacatcagaacactcagggttagctgactcagctacaaaacagcattcattttcctactatgtcactgataaaaaaaaatgttcatttcagaagaaataaaacactataaacagctaaatctggttgagtagggctagaggcttttgatcgttcttctgaaataagaactcactgttctgaaacacaatctctcacctatcacatggggttggtctggccctccatccttcctgctgcaggggaggggtccctgcctcctgccccagtaattgttttactagacttctgaattccaccctctttgggccattttggggcatcttattctattttctgtgtttcccaaatagtttaccttttcctactaattctctagaggcttttccctcttagcatgtaaacaggcttaagaggcttccattacaagcaaagcaatctgagccagacactctcccctgaatgcacctgtaacacagcattctaaccagccaattactccctcaggaacctcccctactctgagagggaagatggcactgaatcaatttcactcagtttcatctcatatagaaaaacaatatgtacttaacagtggtagaggtattaaatgatatatcaatatttttatggaaagagtaaaataagtaaatttaaaccaatgtatatatctataaaatgtaaaatggagtaatatttcttataaaagccaacttacatcttttaagaaccgattaaacacttaaacttctccagtgtaagtcttacgagctactgttatataagtatactgtatttggggggacactgaagagaacaatttgggattatttttaaatacatggagattaaaaaaaatgtatctcagtcagttttccatagaaagattagttctacttcaagcatttaatgttcaccctgtttgtctaggttttacaatatggttattttatattagcaacataattagtacttggataagaccttgagagtgactaaaaaactagctgttagtaaaaaatgactatattttaagtaaatgaaaaggcaaaaaggggaagaagatagaccaataataaaaaagaatcttacaacaggaggaagggtttgctggccacatcaactcttgttgtctggatcttcggccctggcagtccgtgtataccccaatgctgttaaaacacagcaaatactctttgttggagatctcaactgcacagagagcatccattggctgatgtgcaatgaacgatagtgtgtggtcatttgaatggagcatattgcatggacttccttctccactcaaggggtatctcaggaagcctgactggaaccctacacagagctgctcactgaagatggccatccactggacgttacatgggacttgaatttccttaaatttcctgtgccgggtcttgctctggaacagctcatagcagagaacctgtcttttcatagccacacacaggcaggacagagccccatgacgcactttcccagcagttatggtctgacaccctttagtttctggaagcttataaaaatctgtctctcgaccatccaaggctgacataggaaaaagtcggacatggcgatttcggcccgagatcacagcaacaagctggtcacttggaatgagttcaatctgatgaattttcttattgtcaccaactctaataatctctacaggaagaaacaacattaaatgcaaaacggttgtattgactgtatccaaattaaacaccaaagtatatagcccaacccatattaaagacacatacacatacacacaaaagtatccaaggtcagaaatcacagaggaaacaaggcggataattaaacacattatcagatcatttaactcactgacagctaatagctagtattaagttcagcatcgagatcttgtcaccaaggaaccccatgtaaagcatgctgatgctttttgaagtttgttttctggggctaaatcctaggaacttcaccatggaattcctagttttaaaattcaagtaactgcaactcatgcgtctctttaggtatttctttttaaagcattattctatgtatgtgggtgttttgcctcacatgtatgtctgtgcatcacttgcatacctgtgtccatggaagccagaagaatgtatcagataccctggaatgtgagttacagatagtgtaggccaccaagtaggtgctgggaaacgaacctctgggtccttcctgtgcaacagcagccaggactcttagctgttgagccatctctctagccccacctcttcagctacttctttgtatgtacatgttgccatgtatgcacacacaagcatgaaccaccagaaatcagcccagggtgttctttctcaggagctgtctgcttgagctttggttttttttttttttttttctgagtcatcttggccacatccacccttgtttcttagtcagggtctctcactgggacctggaattggtaactaggctaggtcgaccggccagtgactcccagtgctgggatcacaagcacacactaccatgcccaactttttatgtggttctgggaatgcagtgcttacacggcaagcacttaccaactgaagcattctcctaacacttctcaaggtatttctctggggaacaaactcatcaagctcaagtgacctgcttttctcaggctctaacctgatacaaagacagaacttaaaatgccatgtttatgagaagcaaattctcaggctctaacctgatacaaagacagaacttaaaatgccatatttatgagaagcaaattcaattgggtttgctttatttcactcagcactttatttccccccagagagctaaaaacctgtttgttgtactgaaccataagggattttagacattatctcttaaagcaatactaagaatgagaaaagtaatttgtagttttctttgctgtgccatcttagacatgagtggaactgttcagtaaaatgggagtggggtagtacacggagcattagaactgaaagggggtaacagaactgaaagccttttgaattaaagctggtgtggtggcaggaggacaggaggaagaggctggcagatctatgagttcggccagcctttctacatactgagttctaggacagccagagttatgtaatcaaaccctatctccaaaaaaaaaaaaaaaaaaaaaaaaaaaaaaaaaaaaaaaaaacccaaaaaagaaaaaaaatcttttgatttaaaaatatagaaaattatatctggaaaatcttagtaacacaatcttgctcttagacttgagagttttctaatacatcattgaaaattacttcagaataattgggttttctcttaccatctttggtgacatgcacaacaaataatccttcttcatttcccaaagctatcctttcatgatctatttaagacacaaacataaaacattttcgtcagataaaaatcatgtagagataacagaataaactagataatgagaaaattaagataaataacaaagtcaaaatataccatccatatttcccctcagattgcagagtaaatatgtcatgccttttaaaacacagcagtcagctaaaagtctgcttcagtattgaaagaattgcttattcagtaacaagaaaactacaagcccggtttgtgacattacccactccagagacactgctcggtagacttttcatgttttctagatagcaacagaattgggtatgtatataagaacagaacataaaggtaaacttcttcatacagagctgctatttgctgacgccatgctatgtattctacgacttcaaaactcttcaataacatacattacacacttactaacttatttcaattcacaaaagtagaagaaaaatgttagcaggctggctttcagcaccaatgctttttaggaatacaatgtaaatgccaaaagacaggtctgacacaggtctcatcatcccacaaatgtctgacagatgccagacacggtgtcaacagtggtaccagctcagaacgcagcgtagtctacagttatggtaatgcgacgactgttataaatgcatacctatgattgcagcagcctgtgttgttttgatgaggggcagagtgctgtcataagcctctttgggaacatacactgagcggtctctgaatttgtttttcttcaaaatcttgtgtagttcactgagtattcccacccacttactcctctcactctcgctgtctgccagcatcaggatggagcacttgttactaggcgctgagagctgggacgctgtgacctaaaacagtttaatattcacaatattagaaaacagacagctttcatgctagcttcaaggctatgctcatttgcttagcactcccagtaaaatgagcatttaaactttagctatgctgaattagagtatctcactgcaatgctataattcaaacaacaggaggtgatacaagtggaaatgttatgttctttgttacaaaaatgtcacaaaataccataaaaatgcactactcatactaatttaatagatgacacttaaaattatcaagtatcagaaagaaaagcactttacaagtattaactcatctaatcctcttaacaccttcatgagacaggggagctatgattatatactaattttaaatatgagaatccctgataaagagaaagtgagtaacttcttaagggcatgaagctaaagcatgcttctatgctccaagcactataccatactgctctgaaatctcttgtacttcctagcaacccttcagatgatcattaaagaagatcagatcacttgaaacagtaagtaaatgaaggtttacaagtcaatcagagcattttaaaattgtgtgtgtgtgtgtgtgtgtgtgtgtgtgtgtgtgtgtgtgtgtgtagaggcctttatatgcttacatatgcttttaacaatagaatcccactgcaaatcagttacaggtaaagcctttacagactttccttgagagctaggggagaataaataaatagttgttggcctggaaagtaagagacttaagtttaaaatctttgatcttccttagatataagactcacaggcaactaggaagtaggacagatataacagctttacaaatctgtactgtttactttaccaatatagctatcagcaattatctgtatgcatttggagagggagggagggagggagggaaagagggagggagggagagagagaggagagagagagaacgagaacacatgaatataaagaggggaatcaatactggcccaatgacgaggaaaacattaatttggatgttcctgccccaaataagctgaatgcagccccaggagaacatcagttaatactacagaacaatggaaaatgagcactcctaaagttttggaatatttgttataaaggaatagacactgaaacaattttaaaagtgagagttttacagagacaaatgttttttaagttttaaacctcacatagtaatacttacttgaaaattgaactgggactcaaaagtatagaacatgaagcatacttgagaaacatagttttgcattctacaagtctcagcacaattttgtattcatgtaaatagtgtatggtatggacacataaagagcagtaggtctgggtcttgtcccagtgacttcatgatttatacagagtagcaaaacctactcattaaaaacaagaaattaggtgctggctcggtggataaagcacttgctgcactaacctgagggtcagtttggatccccagaacccaggtgacagtcaggtaggtttgtctgttactctagaggtagtcacaggggttgctggggcaagctggccatagctagactagctaacgtgcaagctgcagttcagtgagactgtctcagcaggtaaacaggagagcaatcaaggaagctatctgacatcaatctctgaccttcacatgcacacaaacacatatgcacaccatacacaatgttcatgtaaaaactcactcaagtcatacacaacttaccctaaatatacagggaatatctttccgacttgcatgaataacatcagaagccaggactgaactcacagaaaattcttcatctctgaaatgaaagttaaacatttaggcttattacatgttaccatatgtgtatggttttgcttatacacccaaataacatatatgaagcaattctcaaagagtaagcatatgaacacccaagctcaatttaaaaagaaacaaaacacaagatttccccatatagtgactgacaatactcaagacaattcatcaggagtaacctggtactttacactagatataactgctgactcatgaagacacacaaagccaagaagcacacaggcagaagggccttttgttagtctccagagtccccagtgagctctcttgcctgccatactaaatctcaagcatacttaatctagttcatctgacactttgagttcagcacttaaagcagtgatttattcctctgtcctattccttttgtcatctgtaccgtctttcccgtcttaaagccctgacatggtcttatctttgttttaacagatagttttgctgttgttcatgttatccttaaccacgtgtgctaaggagctcccctttgcctagcccccccatcttttattctgtttattagcaaatctgccaaatctctcttgctgataacccctgtaccaatctctccatatttcactatgtttcagacacctataggcatatctgcaaatgtgcattttgagcaatgggtatgtctgaattagagacatgcatgttatccatcaatcaggagtaatggctgaagctgtagcagaaaaggaggaagaggtgctcaaggggtgcatgaagagtctggacaatggagctagataaacagcttcttaactgtctgctactctagtgtgctgtgaagggcagggagagatgttatccctctactttcatgggatcagtttgcactttcagatgatgggtgaacatgtatttaggactctgttactacatgaccttaaaactgacctttcagagccaaacattggcttatagttccacacactccacacgtagaccaacttgccctagaaccacccgtaactccctacttcctagtatgtcatagtagccatagggctatatcaaaaaactgacccaaaattaggttatttaatgcaaagcctggtaatataaaagaaagttcacgctttatttcctatgttgcaatgcacatacatcttcatcccttggggcttacctcatgtcaatcacttgactaatgacagagctgggctgagacgcctttccttctgcgatatcgtagagaaatagtttgaagtcacagaccacagccagtgctctctgccatcctttcttcactcccgctggcttagggatcttaatttgtttcagtcaaccagacaaacaaacaaacaaacaaacaaacaaacaaacaaacaaaactcaaatgaaaatggcaatgagagcccctggttccatgtgaaccgcagggttcagctaacggctgtgcatacctgctctaggtctgtttacacttgataagcagcaagtgggacataatgtcattagtaaggagacagtgagaacacactcttcagaccctcgatggttttataagctttaaatggtgccatttcagactgactcatggctttttagagaaatagcctaagaggcaaatttagttgtaagatgaaactgacattctgttcccaatgtaactgtacccaggatggtaagcttatgacttgatatttcctaactcacacctcaatagtattctacctctcaggtaagaccagaggcccaaggctccattaagacaattttgacatttgcaaacctcaaggtttggagagtacagaaaactctgtgatattttagaatttatttccaagtaattatgactctaggtaaaatattatttacatgagtttgattcattaaattttctgtcaagtgctgtgtttactgagtgactaaacagaggtactcaccctgacatggccctcatacgctgtccccactcccttctgtgggtctataccaagcggacctttagtctgctcaggaggaaccgggcaagcagtcggagctttgttcacacatgttatatgacacgagaacccacacactttgaggaaaaaaggacacaatttagattaacaacaacaaaattcactgggcactcattaattgcatccatggtgctagctagaagaaagcttattatctactttattttaaacaaccgttttatcactagggcaaaagatccagttgcttgtcagtcagaaattcactgagaagtaataaatgtttttatttctattattattatcttattagtgatcaaactgagaagcaaatggataaaagacagaacaaacacaaatcccagccttgtaaataacatggctaatttaaatttataattcctaacaaagtgatctctgaagttttctagctctttatcctactgtaactcattatcagtcctgaaattctcttgtaagagttactaatggacattcagctacttgatgtctattagcaatgctgaattaactgattaatttgtgtgtgctatgcatgcatgtttatgtgtttgcatgtgtgtgaggatgtgaagcccaaggctgatgtcaggcatcttcctccatctgtcactccccacttcattttcagaggtaggtccctcactgaacctggagctggaccacttcagctggtccagcaccctcaaggatctcctttttccacctcctgagggcttggattacaggtgggcaacctggcacatgtcctggagacccaatctctagtccttatgctcatgtggtaataggcacctttttccctaagccattctcccaggcccaatatctggaaacttctgactatttgaaaacaagtgtttcgatgactataaaggtataaagaaatgcttggagttgtgttctccgcgcagacaggatcagagttgatttcactcagcattttctatcatctcttacacaacacttgctcagagtcacagagacatcggatcggcagcagtgaggcattcaaaactgtctgtctgctcagagcccctacaaccagttggcaacagtactgttacaaagccaagaagtcgtactttccttcctgctgttcttaccttcacaggaacagccctgtcttatcaaaccaaccatcaaggaggtacactgatggcactttgtaggggcagtgaaagacttcacgaaaaactgatgactcttgcgctgcaaaacaatcgacagaagagttaacccttgcacttcttccctcacagcgccatggggctgcaggtacttctcacatgccagagacacacctcacgcgcactgcacagctcgtacctgcagaatttttcctgaatgtaactttagtatttatgattgtttttgatttgtcagcaactctttgcaaacgctggctcccttattctagtctgccagccatctttacttgagtcctttctacttctgccctccgttactgactgagattcttttgcatccctaagtcactgtctgatcttgaatttcttagagtttactttgtatttctgagatatctccttttaattttagctttctcttgaattctttcatctctcacatctttaaagacactattattatttgggggggcagaggtacatatgcaggtaccacaggacttgtggaggtcagaggacaactttcagagtcagttctttccttgtaccctgctgaggcagcatgtcctgctgtttctcctgctacactgtgtcctccaggctagctggccattgagcttccagaagtccccctaatcagtctgtccttccagtctgcccctgatgttacagattcataccacagcacctggctcttcacaggcctccagggggagctcaggcaatcaggttgcacaagcagcacctccaccagaggggccacagctccaggcagacatatccaattggttttgtaagttctaatcacttaaataagttaatttctttggaaacattcagacattttgagcatgttttaagtgttttcttgcatcctttactgaagcttttcatttctaatttgaaaaaaatttaggtcattgtttttttaaaaatgtactttgtgtttgtgtatcactgtatatgacaagtgtacaaaggtgcctttgaggtcagaagagggagcaaattccctgaggtggagttacaggcagtttcgagctgcctgatgtaggtgctgagaacagaactctgaaccttgagagaatagcaagtgctcttaaccacagagtcagagtcatcatatcattctagaccctctgtttctttaattccaactctttcctattgaaagtcatattatgtaaatgttgacaccattcctgtcatataccttagttttcagattttgtctcattttctaactgacttattattattttttattaatatacctattcctcccactctatcattaaagccctttatggacttcagcagatatattcttctgtcaagttcttctagatattatttcttattactactttatcctgtgtggcattacctatctctgtaaggatatgtttattttaaatttctatcctgtgtagtctccttatgtaatggtatgtggttactctttctttctttctttctttctttctttctttcttttttttttttgcagatgttcttttcatatttttgttgttgttgttttttaagacagtgtttttctgtgtagccctggtggtcctggagcttgctttgtaggttggcctcaaactcagagatgcacctgcctctgcctcctaagtgctgggattaaaggtgtgtgccaccacttccagaaattttcatactttttaaaattagttttcagagccactgatctcatccatttgtgatttattcctagtttatgttcaagggaggaagatccctggtcttccagtttctagaatttctttgcatagtcttagacaaggagctcagtcatgtcttgccatatacaatgcctggccataggagggagggaggagggagagatccaccttcacttgttgctgagcacttctttcttagtgtgtgactaaactcagactcacactctctgacgaggagctccaacttaatatttttatcaggtgacaaaataaaggttcctctaataggcttcgaaacacaggatttaagaattaaatacactgtaaccctcccaacattcaaaatggtatttacattatcaaatttattttcttcccaagttttttattttaaagctttgaggaaatcagcaacaaatctcacagcaaacatctaacgtagaagaaatgcactctcatcttttggaacacactatgtttagaccaagtaccttaggtggcaaggcagctgaagcagggcatccctttttccttaaggttggcgtgtgaactggaagtggagcagtgtctgcaatctgaatcccaggcaaaagaggaaatgaatgtcgtgaataactcactttacttagaaaataactagaaagacaccagagtaaataaaccaaacatgtcaacaatgctaagtagacaactgcctcagctccctgaggttcaagtttccacagacgtacggtacttcaagtctgagctcacaatatttacaaatgaagtattttctcaattataatcatttcaatttgggaatttaaaaagaaagaaattagaaaataaaatccatagagaaaataaaaatcatagcatgtaacttacacaaaaatgaagatattttcacattcatttgaatttgtcacattgatccttaaaagtaagtgaatatttagcaagactaatgatacgactatttagaagagtaatttttaaactttaatttttactgtatgtgtgtgtgtgtgtgtgtgtgtgtgtgtgtgtgtgtgtgtgtgtgtgtgtgtgtgatgtgtatgtgcaagttaggtgagtatacatgtgggggtcagagaacaactttgtgaagttgtttctctccttctaactttatgtgggctccagagatgtaactcaggtttgcccaacgagtacaatcagtacttgttaagccatctcagtagtcctagaaaattctttttaactacgtgatttccatatttagaatatatattatgtaaatggaatataatcgcacagatttgaatatatggagattagtgagatttttacacagaagttaattttaaataaaggagttaaaattatttaatattattggcattattaatttcattcaagtttaattataaaccatatctttactgtaagtaaaatgaagtctactttattaagtattgtatatttctttgaataaaaagaactagtgaatttactggatgttattgtgggggaggagggcacatggcttaattagcaaagtaaaaaacctccaaaaaaacaacaaaagacagtaatgtctttttaggatgccaagcaagcatacagaaaaagcagctaagccttgtataaactcaagagtattcaaatattaagagagggttggatagtcctctgcttctaacaataaccactaaaaccaatcttatataaactatatcctgatatggaatttgatgaatgtgtcagtgttttgtgaattgtgagcttatactcaatttaaattctgtttactttggaatagcttgaaaaaatattgagctcaacctgtaacttaacatttgggaagataaatataaaagatgaaaaaggaacactgaaaaaaatttatggaaaataaaacacaattgcaaacaaaattgtcattagagttctacagaaagttctagaaaagttattaaaattaaagactaaagcaaaggtgctggataaaagatcaacagtgcctgataaaaactgcatttgattggatctcactcacacagcaacacaaaatttagggcaccagaaccaatcagtaagcaacatggaagacactgaaggcaatgaactctactgaagaatgaaaagaaataactactgtgcataccatgttcctacatggaaatgcccaatgtcatgaagatgtcagttttcctcatgtaaatctataaaatcaatgtaattctaataaaagactcttaggaaatgaggaatcagcgcaagaatgagcaaaagtacagaaaagcccacaagagaccacatatacaaagtggagacactgcagaggagtcaaatacaggagactcagatgtgggaaatatcagaatccatttcccactccacacagcactacatttcagcatgagtaaagtcttaaatacataaaggcagtaattttaaactgtaaaagaaaacatggaagaaaaacattattttcataaagaccactttaaaaaccacaaatgcagaagtcatacacaaagactgataagctggacaagggttctgaaaaccaaaaagttaacaaaaatttaaaaaattatccttagaatgggagaacatgcttgcaaccagtatgcccagcaaagaactcatatccaggcttaaaaagaacattaaaaaacaaaacaacagaaaaaaaaatggaacaaatggacctcaacaggcaaatcataaacagccaatgaacacataaaaatgctaaatataattagaaaagggataaaatcaagttaatacaaaaattctgcctcacaccaatccaactgacaaaagctagtatctgattggtagggatgtggggagatgggggcctctcacatgctgctgagggaaatgaaaacagatccaaacaccgtgaaaaacatttgggaagaacaagttaaagtgtgcataacatgcagctagtttgcacccaaattgcccatttgcaaaagcaaaatcactaagatcccctcaggaccaattttagtaataaagggctggaaacaacgtgagtatcccacaacagaaaaatatttatacatggtgagagcagtgcatttcattccaatagttattgcagagctctaaatcatagctggttgtcaaaaacaaaataaaaattaaaaaaaaaaggaaagaaatgtgttccagatccagggcaatacagagatgatgtggtggtgactagtgagaccattacccaacacctttggcttaaagcttatatagcagatacaatgaacaaactaaatgtacatttttccaattagaatgtcaaatggtctttggggagaaaactggctcaacttaactgactgaactatttacataacattgtatttctgactattagaaagcaggacttagttgagtgagtacccatggctgattgagcagttagaataaactatccagttgccacagttattcagttgttacagtagtaacaatttcattttaaagccgggtctatgatgcaatgaagtagttatatcctggcttattaaactgattagaagaattaaaacacacgaatcaagaatggcactttcaatgccatgtgcttagtttatatctaatgatgccaatgatttcataaatattgaatataaccgttatacaagcatatctctacatacttctctaactaaagactagctatctacctacctacctacccacccatttttgcctatttcaggtgaatgtgagtgggattttctatctctttctgtattatcaaatgtaatgatgtccaatgaactgtaacttattacacaaagtacttagatttcacttaaaattttcaattcccttcaggcgatggtggggcacacctttaatcccagcacttgggagggagaggcaggcagatctctgtgagttcaagaccagtctggtctacagagggagtgccaggataggctccaaagctacacagagaaaccaggtctccaaacaacccaaaccaaaccaaaccaaaacaaaactttcaattccctttcctgaatacaagtatacagttgtggagcaacactgctccagggaggcaccttaacgggctcagcttcactagatgtggacctagacaggatgtaaaacttgatgcttgggttccatatataagtgttgtcaacaggataaatagtctaggaaaataagtcagggaaaacaaaacaacccaaggaatcatgttttaacaacatgttacacttaaggcatggtcatgacaacaattcctcaaggaatataaaacaaaactcaagattgaatattcacattaaggatggcatcatgcaaaagcatgagtttttactacaaacaagcattttgctaaatattaagaattgcgataacttggcaactgtatggaagttatgggcaagtagtggcaaaccttaggagtggtcttctatgggtagtgggtacaagcaggcattcaaacaattgctgaacagttaaccaaagctctggccccaagcttgctgttcttctcctaccatgaacactagcttttactgtatattatttgtacaccatgtaaagcttttgcatttcacacacaaaaaatcatgcatgtgaaatgagtacttcaaagacacatgttgtagattagatgtaactttgtcctagacaatgaaatttagtccttcatcaggtcttaattgaaagtaaaaggaatttaacattagctttgtgcttgttattaatgtcaaacttgttactttacagcagtagtaatattacatacagacacaccctttaaaactaagtactcttagaaactgaaagtgttttgggttaaaagttagcacaaaacatacctatagataatctgttcagtctggtaattttcaaaattattaacactgggtttaaagaagattattaggaaagatggggtaatttgttttgaatacagcatatttaaaagaacaatgttttaacaaaaagacttaactattttctcttattgttactatggttattcctggggaggggacatgaaggcagacaatgtaccccctctaaattgcaactggtgaaatatttacagtcatgagaatatatattaacactactggctgcaacactgattaaaatcataaagaattttctgtgtgaaactaaatgaacaaataaacctcttaaaaccctgggttgaatggtgagtgatcaggaatagagatcagaaacactttccaagactaactttccaactccccttttatgctgaccaaggagggctccaggtatgtggcttccatgtctaagaacacaaataattttctcaattcaaggctattatctcatgtacagttagaatactgtggtggatagttttaagagtcaacttgctacaacttaaagtcaccagggatgagagtctcaatgagaaattatctagatcaggttggcctgtggacatattagttagatctgtttgttaactgttgatataggaagacttagcccaccatgagcagcaccattccctaggcagggtgtcatggactatgtaagacagaaataagctagctgacagcaagcaggcatcataagtgcattatttctctctgattttgactatggatgtggcgtgtccagctttgttacctcactgcaataatggatgagaatgtgagccaattaaatccttatattgcttttgattggggttttttgtttgtttgttttaatcacaaagcagaaacaaaaccagaacagatactgttatggagttgtgatatattgttcatataaaacagtcaacttttgttcagtatggagaattcctatagtttggcaactttttaagaatacaccaggagcagccctctatggggacccagaaaggcctcttagggtggtgggcacaggccatcattcaaacaatccatgaggtaaggggtggtgagaataaccaacacaatctttcatttttagattttaaaaactggaactaccaaggaacactaactacatatgtatgtgtggcaaagatgactccatatattggtttgctttgggaagttgcaagttaggcctgaatcacaacctcttcattgcaaagccagtcatctatgttccaccaaggtgcctccatgacagaagcactcaaagcaataaggatcatagaggccaagctaaatttttaacagtgaaccttcaacaagaagaggagagtataagagtaagatgagactcaagacaatttgcacagttcacagctttgtttggggatagttaaggtaatcagatcaaactattagctgcataaagcaggggtgtttctcctttcctaaaaccctcccctttctaatgcctacataattatataaattaagaacttaaaactgactcaatcacttacgcttttatggagtgtccaagtggaagattcattatacatagaaaactgtgctattttaagaataatctaaaaatttttcagctatcctgagaggctggagtcctaatgcttggtgtaagacagaaaatcctgggtagaagataattttgagaataagaacaaatagtttaaatgacttttacatctagtcttgcaactttaatatctctaaaaccaagggcagaaagctggctgtcttccaccaatactgactcacagtttatagcaggactactctgagccatgagaacgtgagctaacagaggtaagtgtgagcactgtgggaccagaacatgcagttgcaccactttctcagtatgtggacaaatatgtgtttccaccacagaactgatagcccattaggacattccatgtctcaggaaccaaaacagagctaggtgctgaacatttaccagcatgttttgtgatcccatgacaatgtgctatggcagtgagataccagaggaagaaaatgatccattatcaacttaacttgtggtttcttactcaactcttgaaccctttaatacaaacccttttgttcttttgaagaatctctgtcatgtattaatcttttccatgatcaattttcactaattagtgacaatgaaagagaacaaaatcgaggaaataaaaatgactttcttagatgcattaagtaaaccttggttatactgagaaccacagttatattttagaaagacaaccagtattaattatagtaaaatagaacaacaaaaatcactatatgtgctttctatgttcttaaactaaaaagttcatgtaaaaatcaaactagttttctttttcaaagaaactaagtagctacactggagtaatatttggaaatggcggtaagcaggaatattaaaaagttcaactacatcatttacaataatgttctcatttttaaaaaattgaagtttaaaaattactactttatttttctaagtgtgatccttataaaaacaaggaacaaagcttaataaagacagaaagactcatggcaaaaagaatttgaacaccaaactttaaaaacattccaggtctttgaaaagattctattaaaagcagggacctcaggaaacggactgcactgtggaatcatgtcagggcttctgccagtatcaacacggggtcaagtgcagagtaacaagacaaatgagaacaacgggtcacacattctcttcatcagagttctaatcatcaccaacagaactgtgcttttcaagatggtaataattttaactataattaagtactaacccttaccacatatttgtaattaatggtttattcttaccattaaaaagtacttaactcaatcaaaatttcaggctattcattagatgtgctagaattaaaatgcctaagattaatcttaaaattattcatagatatacaaatagctaacattttcatacaaagcacttttaaaaacttttaaaaaatgtaatcattattgctgtatttaacccctggacactactgaagtattatagcattaattctaagtagttaattgagttattaatatagcaaaagccagtaaatgtgatatatataaaaagcagagctacgccaatttaacagttatcttaatgattataaaaatgatcaaaaaggtcaatagtaaaaagcaacacattaatagatggcatattccagtactgttcaagggaagatcttggaaacaaatcttaatttaaaagtgtaaaaaattcattcaatacttttaaattataatctactagcaaacattttaacaaattattctgatgagtaggaattaagagatgtttactatactgtcatttttgccaatagcttttcttattttcttatatttttggttgtgagcctagcctttaacggctgagccatcttccagccctagcttttcttattttctaagtcaacaaaatgttctatgtggccaaatctcccagtgtacatggctaaccaatcagatataactaatacataataaaatcaataataaaacaaacccttctgaattataaccttatattaaaaacaagccattataaatttattcagtctacagactaataattcaaattccatagagatgggcagacaaatgctagccttcccattcaaaatggttaccatacactaagattaatttggtaaatccaaatatctaatgttttaactatacatttcaaatcgtctgcagaaccaggaatactttatagacctctaactaacaaaggttagctggactcccagatctagtgagacaacattgacagccgacctgcttatgatgaaacagtcatctaaaaccatctgtaatgctagtgctattcatgtttgcatgacgaccctccatgagttcacaaagaatacaagtatcaatggccatcctaccacttcccatgttcaccacaaaccaagaagtacttcatcactaactttccctatctaggaacctggaactgaaggtgcttgctcatcatgaagttgacaagcaaaagtgaaaaggctgtatctcctgcaagtgtccgttagtgctatttaatagagtacaagcaaatccaggtgaacagtactagataacgcctgcttctcagagatgtgcatgtgtgacaggtgctgggacagaggcacccatctggcatatcagaatacgtaggacgggggagtggctgaacactttcaggtcaagaagcatgaagtgagcattggcagaggaagatgttttcagcattaataatgcatggaaagagcacttttaaatcttgacatcttcttagaatacaaagacttcattattaacattattttcctaagtctatactatgaaagatatttagggaaattctcctaacatgcattaaatgagcacatctacctcacaatttctccagaagtgatctatgtaaaatctagtcaatgacatctacaaattgcctcagcattctacatctttgcttctatcagattctctgagaagctcatttatcttgtatttgaataatttagaaagcatacttttagaaggtatcttactattttagtggctcagttgtataaatttacatgaagaacattcctagagctctgtggccaaagccaaaatggaaagaaaaagagaaacccagttaggaaaggagcagtagcaaaagcagcagcacatgcatgcagtggtgaaatgacacacagcacacggcacatgctcatgggttctgcagccaaaggcaaagaacaagggacaggcagaaggcattgggacagcacacagtgagagtctcttacacgtctgcctttgctagctggagtacaggacggggagcgcttcaacagagagagaacaccacgttacacatattcacagggaaggagccaggccctccatatcaacacacagcatacagacttatgcacaaagccactgttttgatacattcaagtacacatatatccaggaaaaactgtaggataaaaacagtaaggagacatgtagtctaagggttgatggatgaggttttcattggcacactcactgatccacacacaccaacattccatcaaggaaataaagaatttcagcaacagatctacttagttttgttactgtttgccataaaataacttatttgagctctagcagccctttccacaaatcacccatgtaatatataattaagcaaatttgctttatacatttacctaccgactccctgctcttttcaaaggtggcttttaaaatgttaagagctaaattaggactcatcagcaaagacaatacacaaaacaaaaacatagttctaaactgtccaccctgattacatcttcaccttgagattggctaagagagaatgtaaaagagactgtgtgtgggtgagaacaatggtaaaatcaagacactagtgaagggaggaaccacaacttagattgatattctgagcatctcattaagattttaaatgaggctaaagtttatgcttaaactctgcctgctgacataatgcatttttctatttgtcagaatatagaaaagagacaaaacaaactcaggaaaaatcatgaatgggaaaatgattctgtgttgttctaaataatgaaatgatagttttaataggcccaacttaaagaataaaagtaggagaagagcagaaggaaaatttggaggagaggacctgtaagtaatcaaactgagagccctgaaggtaacagtgggcctgtgtggagaggatggacgatatgtagacacaacaccaaattaaactggcaatcgtgcttaacacaagccttttttctcctaaacacgccaggctgaaccgcagttagggttagttattcagcattctcgtctatagcggtaacagaagatggaagaggataaccagagggatgggatttggggttagttaagcaccagaacctacctcatgcggggcaaatcatacactataagcaagacatacaatataaccagatataaaacaaaatataatctagactcaattattccttaaatgttctaaatgcctaacagtgggagctactgaacttgggttttacagtatcttggatgtggaacatgaatatatcaaagatttgatgctactattgaaacatagttttactatgactttgaatgataaaatgaaccaatggctaacattggaaaacaaggtcatagttataaacaataaacaaaaatagggttatattataaactataaattaagaataagattttttaaaatgggagcttagtgctagccctccctctaatagagaaaaaaaaaaaacattttctaatagtcatgagattcgacaattccaaagaaggtactgtggttcatgttcttagcaagaggaaagctaagcactgaagtgaagtcacactggcagacaagaaataactctaaagagtatatgaagagaggagaaacaacctagtaaggaaatgtcctgaaatccctgaaggcattgtatgatttctttaaatattcatgagagtagtactatagcataactatttgtcagatgagcaaacataggtattgaaggtcaggtaatttccttcaaactccatgctagaaagtggaatagccagtttttgagctttaccagaacaatggaaggacagaaggaacagcaacatcatgccttggaaacgttgagacatgaagcaaagactcagcagctttttgcactcagctcttcactgtgtgctaggagtttctccgcactatgtaaaacccagctcagtgttcaagatgagcttatgctgcataacagggactgaaggatcagagaggggagagtaaggctgggaaatggctgtgacttggatgcaatttccgtacataaaaaaggaagaaaaactctgagagtaggagcctggcaaggggacactcttcacagatctctatggagaagagctcatttgtttggtgaaatacatactgttagattttacaatctgagtgtttatgggaaagaaaaggatggaggcaagagtttaagaaatagtgaaaatagtctatcagtaaaaataactatgtaattactcaaactttctcttcatcctttctaatgtgaataataaaaatatcacattgttttaacacaccaaacagcagaccacaacatggaatttcactttttttttttttaaagtcagttatctttcagttatattatagaatcatccagcatagtttactattttagaaacaacaacaaagatttccatgttgggagggaaacaggttttggtatttccaaacatactaaaaagtttctatgttgttcagtaatttgaaaatatagtatcaagaatttttttcagtggaaaattatgctgaaatcatcttctgaatataatattgtactttaacaaaatattctgaagacaacatttaatccatttcctatcatttaaaaatacttatgtacactatttgcatttaaactcttttatcttttaatttctgtaaagtattcatgttcaacagggtatcaattctaggtcaaggattactgagtcatctaatgtgaaacagaaaacaaatataacaggcagtgtaggtagaaaacaaatgtctcacacacttattaggaacttctaaattattaaatctacataactaattcagacagaatatgctaatgcatccaatttatggggtatacagtacatatgataatttaaaatcattttccacatcagaaatctgtattaaaaattcatttatattcttactgtgttacaacaaaacaatgagtttaaccaagaaatgtcactttcttgatttctccaccacagaattattttaaaccaacacagaaacaggaagatgctaaaaagaaaaggagaaagtagaacagaaaccatgaaaaatgaaaatgaacaatttcttatacatagtgacaatatttaagcaaagaatggaaaacacagagaatcgccaaaggccaaagcagttttaaaagtgtttattttactacatttgataataataaactataatatttaagataagaaggatgcatttggctcgcataaatttccaagtgatatttctaaaactgcattattaggcaaattcttcaaatcaattcactgatctcttttactgaaggatgcattggtttgaaaattaaagacttacgtcatccaaaaaatcaatcagtgaggatgaggaagaagaaaaggaatcctatttaacgaattcagcaataaaaaaatagaaaatatggatgaagcaatttaatacaaacaaataataaatcaaaattttgtaaaacaattgaaaggcaaatgacatttgtttaaataaataaatgagaaaagcagtcactgtcactgttgtcaaggaacttaggttacttttcaaagaattattcttccttcccccaaaggaaggaaattctgttactatacacaaagtaataaaatgacaaatgactgattattaaattaacggtacacttttgaaataacaactgaaataggttatcagaatctctgtttctaattcttcttgctggaatgtaagcggtttgaaagggaactttgtctactctgctcacagccctattaccagcactaaaagcggagttcagagcattccacatagattctggtttccaactgctgaaaaaggtgataaccaataacttacatttcctgacataaaccatgctttgacattatactgagtttttttcagcagaatgtttaaataataaagaatgataaagagatacgcaatcactatttcagagtacagctaacaagagtgtaggttagcactttagtaaaaaagcattatccttactgcttacttcttcactgatctggaatgaaagccaatagtgagctactgtgagcactcatgttttcacttatttttattgtgcctctaagcctgggagaaaaggaaaatgttttcaaaagttgggatatgctctgctttcactgtttcttgggaggtggggagcaactgaacctgcttttaagtctaataacaacttgggtttcagactttcttagatgtttttattacgtacaagtgtggtcatactttccataagaatgcagacacagtcctcccttacatgattctattcacttgtttatatgattttaggttctcttatgtggctgtaataaaagttttactgcaagtaacttttagatcccagaggatattcagagcagtcacttacttcaaattgatccagagcatcggtaggcgtattcaaaaatgccaagaaagaatgctgtgagtcttggtgctctatacctagaagacagcagcaactttttttttaaagtagaacaattaaaactaattttcatggataacctttcctgtctcaatctactaaagtacttaaaaataaaactactatgtttcaaggcttattaactttacgaagttaaaaaacaaaatacattagtgtttcctagactcaacagttaaattagactagtttccatgacagtcctctgagtcaataattaacaaaattctttttccatctagtacagtggttgcaacatgtgggtggcaacccacttgggagtcgagtgatcttttcacaggggtcgtacatcagatatccaacacatcagatatttacatcatgattcataacagaagcaaaattatagttatgaagtagcaatgaaataattttatggttgggagtcaccacaacttgaggaactgtattaaagggtcacagatttaggaaggttgagaaccactgatctagtacatcataataaaataaaatagaatcttttgggcaatttgataaaaaaaactagaagcttgtctatctgtgattttctaagctcatttaccacccaaacaaggttcctcttttgaaatactttttaaaaaacaatctttccagaaattttaaaatgtatttcataaataacagtgataaaataagtaaacttaattaattttccatttcagatattagcttagtgaagtatgaagaatccaaaattcagtttttctcagatgacttttaaaaatgcatatgcatctttggcaatgatagtaagtttaaatacataatctcaagacaacacggccatgatgataaatactagggaagatagatcagaaatagcctatcataaatttaaaattaaaaaatttgtgtatatgaatgtttttccttcatgtatgtctgtgcaccacatacatgcagtgcctgaggggccagaagagggcatcagaaccatgggactggagttctagaatattgtgggccaccatgtgggtgctgaagattaaacctgggttctctagaaaagcagccagtgctctcaaactctgagccatctttctagcccctattatacaactatgacttttctatcctgaagagttagcaactggtttgtgtttctccccccagtctcctgttgttgtgcagggcaggtgcgctctgatctgtatttgtgcgcatgcccacatatgtgcatttagaggttagaggtcagttgttttgctttatttggttccattttgtttctgaaacatcactaagactagagctcaccatctggttagaatggctggtcagtgaactccacagattttgttctttttctctcccagtgctgagattataggtgtattcccttcaccccaagatgacgggactgtggctgctcatgtattacatactgtttttcttccttattatacctctcctccactgttcatgaattaaaatcaagcaagatcattttagaaggctggcttatccttttatggtgagttcctagtcactctttttttccttttttttttttttttttttttggtttttcgagacagggtttctttgtggctttggaggctgtcctggaactagctcttgtagaccagggtggtctcaaactcacagagatcagtctacttctgcctcctgagtgctgggactaaaggtgtgtgccaccaacgcccggcccctagtcactttggttcattaagaaagtcaatcaacaatgacacaaaaatgtaaccaagtactgtagtccctttatgtgattactctgttctccaaagtatacgcaggcatagagacccaaccagctttatcactctctgtggtatggagatgagaaatggtagagcagccttagccaaatacaaagacaatcaattaatccagtaattgatgatagcctttgtcagaaaaatggattttggataatcccatataaaatgacccttaaagtaagtcacatcctgaatttatttttactaaatcatcagcctcttaatgtttatattatggaaaggctgcataagaagttcaaattgtaggattattacatactctgagctaattccatgtgaaaggaaaaatgaaagttctcaagaaaatgctaataaaatctggaaatcacataggacaagcaatgtaatcatcaaactggaaaacacaacaaacacccaaataattcttctttactaaagtaattaatactaaattagttatttttagttgttttatagtgtttccccagctgtccttcctgaacctgtataattttgtacatttcaggcacataaaaagtgttaataaatgttaataccagcacttaaggaaaggggcaagaggactctgaattcaaggacaccatgggctactctgcgaggctctcaaaaacaacctccccttttcaagtttcctcactaagttctaatgtcaacacaaagcaccactgctgaactgacaacctgacatgagagcatcataagttcatcacaaatacttcaatcccaatctcaaaagttactcacgaaatagctttaacactgaaataacagtcaaatttatggcaaagtggtcacttctgtaactaaaaattcttaatctaatttatattaactaatatagaggctcagccagtctgcatacgtgtgtatgtatttgtgaacatgtgtgtgtttggatgcatgagtggttactaatgtaaagaattctctgtttacaacagtaagttagctctcacacaataaaggacattcagaacaacaggtcctgatgcaaacacactctcatacccttttcagatctaagctcttccgtgtccttcatcagctgttcaatctctgacagcagttccaagttcttcttctcagaatctttcagtttacttcaataagtaggaaaaggaaaatagtcaattaattttgtgtagctcatttggtttaaatgtctgtgaggctaaagtaggagagagtaaactactgcatgcaagacaaatacagcctgtcacctgctattacacaaattaataaagcgagccaaacccatttatttctgtgaagaagatggctgccaggtccaagatgcagtttagtagcagaggacttgcctggcatgtatgaagcactggtttaactcccgaaaaacttatcaacagggtggcggctgctgcactgtgaccacagagctgagcagaggaggctacacgggcctttagagaaagtttgctggccctgagctgaattattaaatttaacaatattatggaagaaaagttaattttagaattctgctagatcttgttcatataaccagagcatgtaaccagagcatatacatatgtgtctctgtgtgtatgcactttgtgtgtatttgtatgtgtgtgtgtgtgtgcactttgtgtgtatttgtatgtgtgtgtgcattgcactttgtgtgtatgtgtgtttgtgcatgtacactttgtgtgcacttgtgtgtgtgtgtgtgcatgtacactttgtatgtatatgtgtgtgtgcctggacactttgtatgcatatgtgtgtgtgcatgtacactttgtatgtatatgtgtgtgcatgtacactttgtgtgtatatgtgtgtttgtgcatgtacactttgtgtgcacttgtgtgtatgtgtgtgtgtgtgtgcgcatgtgcactttgtatgtatttgtgtacactttgcgtgtatgtgtctgggtgcatgcaggtatgtgaagggcagaggccagcaccagatgacttcctcagcagctcttcatcttagtctcagggacaatatcttgtgattttggagcacactgacctggctaggtgtctgaggagcctctgctggagattctcccccctccacgcccacgccatagctcccactttttgtttttttaaggtggggatcagacatcaaatgttaggtcttcactcttacaagatacacactttactgactgactcattgccccaaacctgttcattacttttgttggtgggaggcagaactggagatcagatccagggtcttgggcatgccaggcaagcactatattactcaatagtattcccaaccatatggtcatcactttttgtttaaaaaacaaaaccaaaatggcaggtaggcagctaaacatgtaacttctttccaaatacttttcaacaaacctataaactactgtaataagactaaattattggtccttaccattctgtgatgatgttagatgctttaaccttattcagctcttcctggatggcctgcttagctcttatttctgcatctagagctgactgtaactctagtctagctgacatgtccagttttgcaaaacgacgcattttccagggcatatcctatagagtaaaatgattatgtcttagttcctttctactttattcttaacatttatttaagttccataatgcaaatgagtctaaaagctacattatgagcaatatcactgaaaatgaatggaactggcatataatttatgacaatacatttttcaataaatcaagaaataacagtaaatatgtatagatgaacagcagtaattggcttttcttttcagctccttcagtatggatagctataaaataacagctaacagtgacatttttattttcttaaactggaaaagacctaaactactgatcatgaaaacttttacagcaagtgaaagcctgggaaaactggtacagttaaattttttatgtgctttctgcttcctaaccaggtaagcttccaggtgaaatgtcagagcttactgttgctcgtgtccccaagctggaattccttaacgcttccaattcttcagtcattttagaagctaaggcctgaagatagcctcgtgcatccttttcatcactcaccctagaacacacacacacacacacaagatgaagtacaaagtaaaacacataaaaacttcagtagtgtatgtaatttaaagctttattaagaactaagtaccaaaaacttatatccttaaagaatcccttaaaaggatgaccacatcactgctacctgtcaaaagctgggaacagatttgttaattattcagttatgtataaatggaagctggcagtaattaggaaaccccaagttgcttacatttgataaattattaagtcacccttgaaccacaaatgttaactctttagatcttacactggattttctgaagactactatgatttctcattatctagattctgacattttatctcacaaaacacgcatactttctttaaagctgatgtatactgaacttagaaaatttaaagtatgatgttttacagaaatcagggttatgctatgatggaggatgttcttctgtgtatatgtttctattattggttgacgaataaaacactgattggccagtatccaggcaggaagtataggtggggctaggagaggagaattctggggagaggatgccagagagaggccatgtagaatcacatagattaatacttatgggttagtaattaagagtgagctagccagtaagaagcttaagccattggccaagcagtttataaataatacacctctctatgtttatttgtggctgaaaggcagcaggaccaggtggaaaagaaactccatctacaatgctttaacaagacacataagaaagtgttcaagatccttagccatcagggaaatgcaactcaaaaccatcttactcctgtcagaatggctaaaatcaaaaacaccaatgacagtttatgctgcagaggatgtggagaaaggggaacactcctccactgctggttggagtgcaaactctgtacagtcactttggaaatcagtatggagattcctcaggaaaatgggaatcagtctactacaagatccagcaattccactcttaggcatatacccaaaagaagcaagttcatacaacaaggacatctgctcaaccatgttcatagcagcattatttgtaatagccagaacctggaagcaacctagatgcccttcaactgaagaatggatagagaaaatgtggcacatttacacaatggagtactcagcagaaaaaaacaaaacaaaacaaaacaatggaatcttgaaattcacaggcaaatggatggaactagaagaaaccatcctgagcaaggtaacccagtcacaaaaagacaaacgtggtatgcactcatgtgtactcatggattttagacatagagcaaaggattaccagcctacaatccacactgccagggaagctaggaaacaaggaggaccctaagagagacatacatggtccccggagaaggggaaagggacaagatctcttgagcaaattgggagcatgggggaggggagagggagctaggagaatgagaagggaagaagaggaaggagagaaggacatgagggaacaggaaggttgagctgggggaagaataaaagagagcaagattagagataccataacagagggagccattataggtttaaagagaaatctggcactagggaaatgtctggagatctataaggatgacaccaactaacaatctaagcaacagaggagaggctaccttaaatgccctctcctgataatgagattgataactaattcatatgccatcgtatagccttcatccagcagctggtggaagtagaagcagacacccacagctaaacactgaattgaactggaatccagttgcagaggaggagtgatgagcaaaggagtcaagatccaggctggtgaaacccacagaaacagctgacctgaacaagggggaaggaactcttggccccaagactgatagctgggaaaccagcatgggactaatccagatcccatgaacgtgggtgtcagtgagaagacctcggaaatctattgggccccttgtagtagatcagtacttatccctagcataggaatggactttgggagcccatcccacatagagggatgctccatgagcctagacacacggggggggaggcagcctagcccctatctcaaaggatatgacagactctgaagaccccctatggaaggcctcaccctccctggggagcagaaaggatatgggattggtagggtgttagtggggggtgggagcaggggaggaggtgaggaagagggaattgagattgacatataaaacaatcttgtttctaattcaagtaaaaaaatagaggaaaaagaaaaaaattcctgttttctaaaagtattaattaaataaaaatgaaagaataaaggataacttttaatgaagttcaagtacaatttctatttaacatcttaaggttatgcaactgataaaaaccagtttttagatagaaaatttgttaaattacacattaaaggtacagtgacttaagaggaaacccaaagttgacctctagcctacacctatacacacatgcgcgcgcgcacgcgcgcgcacacacacacacacacacacacacacacacacacacacacactttttaaaacatatttcctgctgttgaaatttctagttatttaaaactgaatcatgagccaataaaataaatgttccataatgctcacatttaagtctattatttatgtttcttcacaatactttatattatcatctgaagttggcagttatttcactaccgtgtttagatgatttcacacttttttcttctggaagaccaacaatttgaggtcagccttgagtacatggcgaaaactgtcttaaaaaatgagtgaatgagttactgaatgaataagtaaagattccttccttcatcaggatcacttcccattctcctagtcactgtaaaacacagtggtggtctaggatcacacatgtttttggggaaaaaaatcagtttataaaacaattttcagctctttttttttttctattcagctccatgataaatttggctaaatgttaaaatggttctctttagaaatgtaaacccaatgatgtagtcataaattaaacatcaatgaattaacaattatatttttttgtaacacagcaaatgtccacaatctgggcatgtctgtatgcattagttaccagaagagctctacagtcaagtcaatatagatatatttgggttattagaggaaagttacttaaaatacattttattcacttttgatttaagaagggtattagaaaatagaaaactgattaaaataaaaaatagtaatagtaaataaaaatcctcaataaataattaacaggtttataggtacataaaggaaccagctattctgacataaaagttaaaatgggtaaagatgtaaataaaatacaaaagttattaggaaataagacttcagtggattctgctttctccacaaggtataaaatatgcaaatttcataagcatggtagcaagcattcggtgaactaagatgacaaaatttataggtcaaataatcaaaatcagtgctgagagcagaggaaatagtttgtgaagctaagtcacaatcacttaaaaaccccatgcctgaactgacatgttatacttacaaacacagcatttgttcagcttctacatttttctcaggctctcagttgctaaagataatcataaacactcagctttgatcttagaaaagaataccaaagcaagtggatgagattcttagttcctcaaaggttcgcctttcccaatcttataaagtgtaatccctaactcactctccatggcaaaccaagatgaagggtgttaggaacttctcagtgtccacaccaactcagccacagcccatgccacccacagcagcacatctggaagaacactcaccactggattatttctgtgatttgggcttcccagtgggcaacggattctttcttgtctgctagatctttgacctcttcctctaagtgctggttgcgtaaacttaagctctcatacaaggcagtcagctggaaggcagtgtgaaggcatgagtagcttttaggaacagggcttaacaatcccgttgttctatctaataatgcataatcttccactaaaaatgtttgtttttttattgtcccacatcacactcaagacaggatttggttataatgagcactttgaattttcctgcttcctttgcttttcctcacaccctgcatgaaattggttctagttgtgaatattcttcatttaattgaaaaaaaaaaaaaacaaccaattctgcaggtaacatccactctttcttcttatccctcctgctcctgttttctgcaattgctatgttaacttttaacaaatcttgtaaagaattacaagcacagacaaaaatggttttgagtcaccatgtgggtgctgggaatcaaacccagatagatcctctgaagagcaggcgccattgtgacccaggggatatgaccccctcttttggactctaccagcactgtgtgcatctgatgtacagaatacaggctgacaaaatgtccatacacataaaataaaaataaaggtcattaaaaaaacaccaaaaggaaactgtgtacaaaagaataccagtccaaaagaacagagaaaataagttaaaatagataatatacttaacaagttcaaagctagtctgggctacaagagacacactctcaaagaaggtggtgttggggaggcgcacgggaggcaaaatgaaggggggaagcaaaacagagtccgacacaaatggtgtaacaaaacctggtcatgcaaacaatgacaccttaaataacacacaacaaatacaagagacaatcatgattgaaaccacagtgcatgacacccagcatgtaaattgaccaagtgagattgaatcactcaccttatcaagttcatttgttaactttttattttcttcagttagtaacattttttcccgttcatattgttgtttgaactcattttcaaattcttccctttcactttgactaacacaattcaaaacagaaaagcagaaaaaggaattggattaaaagtcaaccaaaaaaatatttttgtaacatttacatagcaactacttaagagtcagactttagtatagataggaacagacacagagatggggtatggtgatacagaaggacaggtctcatgaaaacctttccaagaatctacaatgtgtctggcatgatagcacatgcctttggtcccaggactcaggaggcagagggatattgatgtttgagagcagccaggtctgcatagtggattccaggccagccagtgctatacaatgagtctctatcattgttttatatgatgtaagaaaggtgggctgagctgggtgtggtggagcacgcctttaattccagcacttggggggacagggacacagaggcaggcggatggatctcagtgagttcaaggccagcctggtctacaaaatgagttccaggacagccacagatacacagagaaaccctgtctcaaacaaacaaacaaacaaaaaaacaaacaaacaaaagaagagtggactggcctattcagtcatttaacaaatattttagattatctgctatttgctaacaataaactcttgtgagttttataaacaggccctccttatggagtttatattcaagttgcaggagaagaaatattagtaagtgaattaatttcgggtaagtctataaggaaaatagaatttggtaatgtggtagtattttgtctatgatctaacaaataaagcttgcctaaagatcagagagcaaagctagccacactagttagcataaaggctggcgctggtggcacacctttaatcccagcactcaggagacagaggcaggcggatctctattagttcaaggctaccctaggctcacagcagcactgcctcaggtagctgggtgggatagcactgctccagtgagctcacagcaaagtgcctgagacttgtagactctcgagcctcatttgttcactttgattgtacatagacactaggatgtataattaaaggaagaggtcaggcaagagaatatatgagccacatgatacttgttctcatctctagtgtctgtctctctctctctctttctatctctctctctctctctccctctctctctctctctgtgtgtgtgtatgtgtgtagaaaatcaccattatatgtcagtagtcctctcaacacttccagcccttctctcctctgacatttagacacacacatgcacaacaaataatattattaaaggatatttatggagcaagcctgacttaagactgtttagaagtaaaccattcttaatgtctcctgagagaaaagcagaaagcggtttctaaagactatgctgtcatgtcgagaaataaacttttgtctgtggcagtctgatagaagatgtgagcaacaaaatgaaattcactgctgatcagttctggataattgtatgtaattgtttgcaagtgaatgaaaggcataagtagcgggtgaccctaaaatctcctataacaactactgaagataaatcataatttaaattataaattcaaggaaaacaaaacattctgcaaccaaatgtgtcactgtattatttaaagccccaaatgttacatttagttattatattaaggaatctttcctggcacagaagtaactttgaaaacaaacaaaatcagaaaaaaaactgcaagaaagctttacagaaaagtatgttcactaataaacagtaaaattccatataaaactattattattttttctaatagtactaaacaaagcaagtcttgttttattattattattattattattattattattattattattattattattattattattattttggttttttgagacagggtttctctgtgtagcttttttttggagcctatcctggcacttgctctgtagaccgcctgcctctgcctcccaagtgctgggattaaaggcgtgcgccaccaatgcctgttaagtcttgttattttaaaatgactactagaagctgaggtctgctgccagcctgtaaacaaatcaaaagtctctgtgagctcactggagcagggctaccccaccatcggcctcaggcagtgctgctcaccttccccacagaatgcatctctactgaactgggtatgtctctggcttctttccagctgccttgtaagcttctcttctgccttcctgcaaatgccagtgctcctcagaatgaaacctcagatgctcacacactctccggacattctccctgagtactcaaccatgtcacctggcttcaattactatctgctacaccagtggatcttggaacctgccggggctttaaactgttgtcttaacatatcccacaccaacgtctcccaattcaacacaaaaaccagacccgccttccaaactgacttccttcatctatgcccatttacttgcactctcttcttctctacaggtaaaactacatatgcctgaggaaggctgatgtcttcatttatctagaacctccctcccaactctactgaatcatctcttgcctgatttctgtcagattacaaatatgtcatttctactcagtaagcacacatacacccccaccacccccactaccaccagcaccaccaaagagcaaagtaactggagataaacttccccagctactatttcactgtttactttgggcagcaacaagttcaagtactagtattactccatgggctctccttcaggtctcctatgaccacttttccactgagactgctattatcaaaatcacatgatgctaagcgcaaatgccactgtgtagttcttttcataatatgaggttttcctacacactgacaggtttgacatgctttcttgatcagggtcccagagaagcacacttgcctggttttcttcctatcattctctctctattcactttgctagctcttcctcatcacccagtttctaaagaccagaatgccccagagctcagttctaggatcttctatgctattcactcaatgaccacattcagactcacaccattagacaccacaggagagtgacactcagaataacactcccaccctgcagccagcctactttacacatgcaccaaccagctaacattcttctgcagtgagctcttaacactctcgtggcctgtggcctgtggcctgctcagcacttcctcaacaggtgggctctcctctgtgtacaatgttctcacacagttcacactgtatttcctcttcagtgggaagtcacctcaggtacaatctcctccaaccacctcctcttcccctctgtgcacagatttaattttcccattaacggccatttccctcttcctttctgttcccagcacaggtcactatgtaacaatgtgttctacacttcacttattccgagggcaggttccatgagaacagacttttgttcagtctgttcactgccataccatagtgcattgaacagtactttgcatttgtcaagaatgcaccaaatggcaaaaacgtgggcttctgataaaaataacacagaatgcatgccaatagtctactcagctacctgaatcctagaagctgagtgtttctgataagtcctcctgctctcttttcttgtagcagctcccttctgtcctgcagattctgtcttctcagtacaatttctgaatctatcacacttttttccaacttgtccactatcttggaccactacctcatgttacagctggattcctctggatccttctaatcatcctccacaaggtagcaagtgaccattccaaaatggtatcaagtaattttccttacgttaattcacaaatttgcctgtgttttgtttttttcctagtttcatttctcaccactccatttttctgtgtgtgtacctaccacagtaaacgactcttgttttctaatgtgcggcactgcctttcctttgggtcgtagtcattcgtccacctctgtctggacactccccactcacttgctcctcgttaggtccagggaagatgtacttcctgctggaaggcttcgaaggccttcttacacctctcctgtgctgcttccctccttctccctcctctgcctctttttttccatgctgcactgactctgtccctgcagggacttggatatacccattgcctgagtttcccaggacttggcatacaacaaatacttagcagatacttgctgaatgagaaaatgatttgattcttacctttctcttctggttttctccagtttgtcttttaaaaccataatctctttattgagagcaagttgctggccttcagaatcatgcagctccttcttcagatttttaatctcacttgcatgtattccttcccttttagatatttcttcttcataaaagatacttttcttttccaagtcagtcttcagcttagttatctcttgctgatgttctatgctgcatattcctggtgagtaactaatttgtttttgctatatgtatacaataaaagattaaagaaataaaataagtaactcctttctatcaggggctatatatgcatatatatatatatatatatatatatatatatatatatattctcagaaaaaaagggcatgtaaaggccattatttatctgacatatattacacataatttcctcagtttatattatttcatggtcaatgcctctgatatttttgaaagtctgtacactaaggccagagactaagctgaactttttgttgtcatttgtatgattttttgctttaaatttgttccagtttgcttcctattgctatggtaaagactatgaccaaaagcagcctgggatttattacatcctataggttaaagtccatcatggagggaagctagggcaggagctcagggtaggaacctgttggtaggaactaaaggagtgctgcttactggcttgttctccatggcttgctcagcctgttttcttatattgcccaggaccacgtgcccagataccacctacaatgatctggaacctcgaatatgagtcattaaccaagaaaatgccctatagacttgcctacaggcaatctgatggaggcattctctcaatccaagttgcttcttcaagctatcagacagaatattaacagtgagacatcagaagttcatccatcaaattcagaaatactatcaaaagaatgggtgacgtcctttatcactcctgtatcacaataattttagttattctgactagcatgtgaaacaacaaaaataaatatcgtaaagaaaactaaaaatactacttctatataactatttcccagtatcagaaatggaagacagtataaaataaaaaataattctagatattaaaaacaagcaataataaaacactgttaacaataaaaaatatcagacaaaaacatgactataacactcataaagaataacagtgagaaattcctcatcggaataaagggaaaagacccatctttatagatataaaatattcaaatagaaaactatcaactactgggaagggaaaatcaagtgcccatgccttcactattttccatgttgccttccatacaattctaaaagacagacctgtttcaaaggtgagaaaagtactggacataggaagggaggaaaacaaatgcttttcatctgtgaagaatcaatttcaaagtagccaagaaaatactgaaaaagaaaagtgataggagtactcttttcaaatcactaaaatacactctaggtctctaatgtagttatcactgtaatacatcttctccaactgagtaattaaatcccacgtggaaaatatctttagtcaatgaagaaggcaataattaataagtggaactggaatcaccaggcagcaatataagaactgtttcggccataaagatggctccactccatcttgactaaaggtcagcgagttcaaaactgtccctagtaagtcataagacctaaaggtctaagtcgtggctacagaaggatgtttgatcttggccttgggtgtcttatccaaataacaaacagacttggtataaggtgtggttactcctgaccctcaaagccaggtaacgagaaattaaatataaggtgtggttacccaatccttggagaattgaggaagaaaagtctgtttgttctgtatatgtgataccatgttcccctttctgattaaggtatttaagaatggcagaaaaataaacttgggatattcagtattgactgaaataccctcctgacatctatcctgtgtctctgtatctctcttaactcctttagctagcctttcttaatccacactcccccttctcaggtacgaaccacgggcacatccgctggctttgactgcagccccgaaaagacagcttcccacaaagaacaaagaacaaagaatggtcatttcataacacttggcaaaacaaactacaaacacattcaacagtccagactttgaaaccctatagaaacccctgaaagcatgtgaagctacatattaacgacctcgcaggacaagccaagctttgaagcaatagaagaaatattgagtagagaaatcttctatagttttacaaatgaacaatacaattataagacaaatgaaatgatggactgaaaatagttgttgaaaactaagaaaaagtagtatttctgctatgtaacaaatttatacaaattgataaggactgcaaaattaagtgggcaaatagaaattttacagagaaaaatacagtttgcaagtaagtcataataagccaagaaataagaactactataactttttggcctgtcatatttgcaaaggtgtttatggattttaagatgatctgctcatttcacttctaggtatttattccaagaatataataaagaaaaagtatcacataagtattcatggaaagtatcctattacaaaagatgggctggagatggctcggtggtcaagagcactctgctcatccagaggaccccaattctgtcctggcgcccacgtagtagctcacaattgcctggaactctagttccaggggatctgacacctgcttctggcctctgtggcatcacgtgtatgtgctacacttaacatacatgcaggtaaaacactcatacacataaaacaaagtaaaatattttttaaaagttttaaaaagctcatcatttaatcatagaagtgattgcagatattcttctcgaatgaactgtaatcaccaaaattatgaacatggtcattttttagtagtgaaaatgctttatacaaaaagtgtaagtgtccagggttgaactgtctccgtaaaattcttacgttgaagacctaactatccagtattcattatctaatcttatttaaaaactgtctttcagagggaattaagttcaatgaggtcattagggtgatccctaatccaatatgaatatctccttacaaaaaggagagatttggacacagactgcactcaggagaattccaaataagtgtaaagacgtatcaagggatgcaccaacaaccaaggaacgtcagaaatgatcaaaacccaccctaagctgactctccaccatggtgatgctgaacctctagcctccaaatgatcaattccatttttgtaagccacttatgtggtttcttctgttgttgttttggttttttgagacagggtttctctgtggctttggaggctgtcctggaactctctcttgtagaccagactggcctcgaactcacagagatctgcttgcctctgcttccagagtgctgggattaaaggcttttgtgccaccaccgccaggcttatgtggtattttttaacagccctggcaagctaacacactaggggttggggattctagcaattattaacttcacaacagtaatattgatataatttgcatatcacataattcacccactaaagctaaaaattcaattatcctttcgctgtcatttctatgaatctactgtcaaatccaaagtatctagtaattttatattttgtttcaaatattgaagttgacagcccatttctgagttaatttttacatgtggtgtatatgtactcttgcatatgaacttctagttgctcaaacacatccgtttgagcagcggttctcaaccagtgggacgtgatccctttggaaagcctttagctccaaaaaaatttacactatgactcataaaagtatcaaaattacagttatgaagtagcaacaagaataaatttatggttgggggtcactgcaacatgagaaaatatattgaaggtcatagtggtaggaaggttgagaaggctgttagaggctgttctgggcaggagagatggttcagcgttaaaggccagggaaacaaaccaaaacatcaacagactgtttctttcccaatgaacagaatatctgtcaaaagttaagtgactgtagatacaagtatttgtttctgcactcttataaaattcagtagtgtatctgtctaactgtactacatcacagtgtttgaattattttgattttgtttccaatcttgaaattgcaaattctgagtcctctatcttaagactttgattccaaaatcattttggatatttaggcccttcaaagtacatatgaatctgacaattttgcaaaagaggatactgaaattttgatagggattgaattcaaattgtacataatgtggggtggtgctggtgcctttagctgctccaagtccttccgtatacaaacatgtctcaccacttactcaggacttttctaattttttctccaatgctttataatttttcaggactcagaatttcatcttctgtagttaaattcattttgaggaattttattttttaaatggatgttactataaatggttgctttcttaagcccctctgaggatttcattgcttgcttaggggagcatagtgcatttttaagttttgattatgaaccttgaacccttggtaaatttgtttgttagctctaatatttttctttgcaatttttttttaatgtaggagtatgtcacatatgaagaggaagagcttcttttctggtggacatgctttttcttttctcttgtgtgagtcatctgattaaaatttccaaagatattcaccaaccccacatctgacagagggctgatctccaaaatatacaaggaatacaagaagctagtctccaaaacactaaataatctaattaaaaagtggggtacagaactaaatagagaattctcaatagagaagtctaaaatggcagaaagacacttaagaaagtactcaacatccttagccatcagggaaatacaaatcaaaacaactctgagataccatcttacacctgtcagaatggctaaaaatcaaaaacaccaatgacagtttatgctggagaggatgtggagaaaggggaacactcctccactgctggttggagtgcaaactgtagattcactttggaaataagtatggagattcctcaggaaaatgggactcaatctaccacaagatccagcaattccactcttaagcatatacccaaaagatgcacattcatacaacaaggacatctgctcaaccatgttcatagcagcattatttgtaatagccagaatctggaagcaacctagatgcccttcaactgaagaatggatagagaaaatgtggcacatttacacaatggagtactattcagcagaaaaaacaaaacaaaacaaaacaaaacaatggaatcttgaaattcacaggcaaatggatggaactagaagaaaccatcctgagcaaggtaacccagtcacaaaaagacaaacgtggtatgcactcatgtgtactcatggattttagacatagagcaaaggattaccagcctacaatccacactgccagggaagctaggaaacaaggaggaccctaagagagacatacatggtccccggagaaggggaaagggacaagatctcttgagcaaattgggagcatgggggaggggagagggagctaggagaatgagaagggaagaagaggaaggagagaaggacatgagggaacaggaaggttgagctgggggaagaataaaagagagcaagattagagataccataacagagggagccattataggtttaaagagaaatctggcactagggaaatgtctggagatctataaggatgacaccaactaacaatctaagcaacagaggagaggctaccttaaatgccctctcctgataatgagattgatgactaattcatatgccatcgtatagccttcatccagcagctggtggaagtagaagcagacacccacagctaaacactgaattgaactggaatccagttgcagagaagtgatgagcaaaggggttcacaccaggctggtgaaacccacagaaacagctggcctgaaaaagggggagctcatggacccctgtctgatagctgggaaaccagcataggactgttccagaccccctgaacatgggtgtcagtgaggaggccttagcaatctatgggttctctggtggtagatcagtatttatcccaagcatacgaatggactttgggagcccattccacatagagggatactctctcagcctagacacatgggggagggtctaggtcctgctctaaatgatgtgatagactttgaaaatccccatggaaggcctcccccctccctggggagcagaaaggggatgggatagggatttggtgaggagcaggggaggaggggaggaagaggaaactgggattgacatgtaaaaaagcttgtttctaatttaaattaaaaaatgtcagaaactataataataataataataataataataataataataataataataataggaagaagaagaagaagaagaagaagaagaagaagaagaagaagaagaagaagaagaagaagaagaagaagaattatttccaaagacgtttaacccaatggacaatgagcatcccagccttactcctgatcttaagagggaaacatctgaaatttcaccatttactactgtttcagtggtttttcaaaaatcactttcatcatgctgaatatgttctctcatctctaatgccctgatattgttttaattatgaaaggctgaattctatgaaatgacttttgtgtttcaactgaaaaaatcatattccctctaagttccattgatatgatgtattatgatgattatttttctttttttacattatagtcttactcagctatgaactttatgaaccacaatatcaacctacaggtattgtacacccactagtaccacagccgcacaactgttatggagataaccaactgccctgtttggatttgaggcttgtgctatgagaaggaattcatgcctaggttactgatttgagaccatagaatgctgccttcacagtatctatgagctctgaaatgacatgctcccactctcatcttaatttccttgggtttcttctttggctcactggctgtttaacatctgtgtgtttttgagcatcccagtttttcttctgttggttttcagctacattcttttgtgactaaagaagattctttgcagaaattcaatatttttacatttactgagatttgttctgtggcttaacccgtggtcaattcttgagtttaccacaacaacttaaaaagggtttgcattctactgttgttgggtaaaagctaacatacctgttaagacaagttggtcacaattctattgatgttctgcactgctagaagtgggactcctactgcacaagtttttctctctttacatctgtgaaagtcattcttgtccattttcagtggtactggaaatcaaaccaccgggcaagtatcctacacctgaacttttacctcctgccctctttgtgcagttttccttttgtggcagggtttcattaagttgatcaggcttaaaccttgtagcccttctgcttttgcctcccaagaagctgagactacagtccagttcctccaaacaccactaaaaattattcttcctggagtaaaaatgtggcttaaaattatatttatataccttttataaagaaagtcctattttaggaaaacatcctaaggaatgaataggtattgtgggtagcagacaaagcatttgaatgaagctagtggagtatcacaacagtaacccacttccagctcccccagtctttgctggcctaactcctacttacactttgagacagaggtccccaaaccaagatttcatgggtcagtgccattttgaaataccttttagaactgaattgcttttttctttttacttttatcaaattaagatacaaaacccaacaaccattgccattaccggtatcacctgaaatcactatccttgtatactatacaccaaatgatgagaatttcagaataaagacaatattggccaaaaaagttaaatttatatgccaaagataagtaaattaacctaaggaaattatatatagtatgttcataatcacagcaaacacttactgagcctgttttggggaagtttttttctcaggagctattcagtctctttcttatttagggtcttttactgggtcctggttttgatgattaggtaggctgactggccatagcaaaacccagggatccacctgctacctctccagcactggggtgatagatgcactacaccattcctggctttttatgtgggtacttgggattgaattcatgtcctcatactttatagcaagcattttactgactgaactatctcctcagccccactcccccttttgggccttttatagtgtcaagctctagtaaaaatctttaaatgtattatttactacatagttatgttattatatcaaatctgacatgtaattataagtcttcaatgtagcaatttttttagaaaaaatgaaaagcatactactatatgaaacatagcactaagaattagaaaacctaatttagattatacatgtcaatgtgactacaaaactctttaattcttaggggtttcaacttcctcaaatgaaaattatgttttatgcatgaagatgttataataaaacacactcatttgtttgccaacctaaaaaattttttacaagagggcaagagagatggctcagtggtaaagagcactgactattcttctgcaagtcctgggattgattcccagcacccacacagcagctaacaaccacctgcaactccagttccaggggatctgaccctcttctaacttctgcaggcactgcacacatgtggtacacagacacaagacacgtatatgtgtaacataaaagcaaatcaatctcaaaaatatttaattaggtaaattgccattgtggggaaaactgggcactcctagaaagacgagaacgatgttttggggttagtgttgatcctgacttggctggatgtgaggtgcctctagctacttctaggtgtgtcttcgagaccatcagtgacaccaacagatcacaaaggctctgctctctcacagattaaccctttgatggatttcctgggaagacagtgaaaggaagaagtggagcctacctggagggaggagagcactgggaaggacacatgtgcttgagggctgttatcctgtccacttcctgcactgcccctttgagttcctgcgtgccaacaagtgaacattcttttccttcataagttccaccacgatgttctgcctcctaacaggcccagaaccaataaaccaagccatacaataggagctctcaaacaaggaaggcaaaataaggaattcctttcttacattgttttctcaggtattttggtcacagtagtgaaaaagctaagaaaacaaatgtctcagacttttaggttgcactctctagttcttctgtattaagtaaaagaaacatcagagtttccactgacattcagtcatcaaagctaatgccaattctaccacacaactgattcaatgaaaagcacatgtattaaacaagcattaaagaaatgaccacacacagaggacaggttaataatacatttgtctatgttttgaataagcaaggttacagttctggcgagaaaacagatctgtgagttagtcattaaaccttgaggcacttactataaggattcaaaaacagcacaaaaggcgcatcctaagataccactcagttgattctgacacactcttcagcatttgcaatgccatcactgctatgaattactgagtacaatgagttgtgagcttgcacatgtacttatgtatccctggagcagaagccatggatgagaaaattaaaagaggaggcaggcaaatattccattcagcgttactcagctagtaactagtcaggctagaacttaaaactgggtcatctggccagagctggcctctctcgggtcatttacaaaacaggtagaggcatgatgattaattctgactgtcaacttcataggcttgagaattatcacagaatcaaacctcaggcatgtctataagggagttcctagattgggttaacctaggtgggaggacacaccttggagtcatagactcaacaaactgggaagggtgagatgagtgccagcatgtatctctttctacttcctgactgcaagtgtgatttgaccgcaagatctgctgttatgccatccttgccatcatgaacagcaccctcaactcatcagctaaaacaaatatttctttccctaagttgccttaatcaagcattttgtcacagcaagaaaaagtgtcaaattcagggcaccctggtatcttataacaacatgattcagattaccaggacaccctgttcaggtaggcagtccttggtggatttctactctctaccacacaaacccgaatgtgatgagcaaatctgtgtcagctcccaaccagtaagaatgagatgtaggactagactggaagcagaggtagttttcattcatcacccagccttcctataaagcctgccgagaagagaattcacccagggtcataaggtcaagcagtaccttcagtccctccagttcattttccagttgtttggaatagtgttcactctgctctcgcagcttcctgtcctttgatgcttcagcaattagagcctcagtgtgaacttccagcttcaaaataaaaaggacagaattcatggttagttttcaaagcacctttccccaagaaaatatatagctcaaatggtgagattcacactagtttatagaaccaagctacaaaagaacttttatcaaaaattaaagaatgggatgcacattacttcactagtctctaagtgcagtttaaagcactactccacagatactacaaatttgcctggctactgacctctttcttggctctctctgctctgcgcagctcttgccttaagctctcagctttttgcatcaccaggtccacctcttcttccttatctcggacatggcgagcaagtttctgtttttgggtgtgcaattctgttagtcgctcattgatctccatgaactcctgcatggccagtttcctctgacagtgtgcgtctttcagctctttggattggttttttaatcgctcactagcctggactagttcctacagttttgtaaaaagaatatatgttaccaaatctgcaacctggacaccacatttggccatgaaagtagctattattacgtcatgaagagccaaaattattcacctcaatacaatactaaagtagatggattactcctaaagacacaaaggtaatgatgacttgtttaccttctcaaactcgttttttgttttttgcttttttttttttttttttttttccgagataggctttctctgtgtagctatgaagcctatcctggcagtcgctctggagaccagtccggcctctaactcacagagatccgcctgcctctgcctcccgagtgctgggttaaaggcatgcaccaccaacacccggcttcaaactcgtttttaaattttatttttacttatgtgtatttgtgtctaacctgtattatatatgtgcaccatgtatacaaagaacctataaaactgaagttatagacaattgttggctcccacatgggtgctgggaactgaaatctgcaagagcagccagtgctcttgatcaataagccttctctggcaccaactctcaaatttttatgctggcatgaaaatgcaaaaaggcagctgaatgagcagaatataaaaatattaactatgatattcaagatactttgtaaaatttaataaatatttgggcaattttttaattaaattgaataactgcaaataacaacaacaaacagatgactttctcttcctgagaagaataagccctagactaattaacaaggagaaatatccctaaatctgagattactgctttagaggtgctttgtagactcaggtccatgcaactggaggaaggaacttcaaggcaatttggcttattcacacattaacagtgaataaacatgagcccattatctatagattcccaaagaaccaaagaacagaactgtaggggaagctgtagccacgcctacttaggggctggctacaggtgtgcctgaccacgcttgtgagggcatggtcagagtgacgtagtgtgactgcatttgcgctttcggtttcacctttgcttcttgctgtacagactgctaccacgccggctggctaggtcgctctgtaaggcttttccctattaaatacccttatatttctacctgactccgtattggtaatttcctactatacagaatcgctataaggaattaatggcaacaataggaaacaaaaataaataccagaagtatttgggcattattagatcctggcataagagtgatatgtatgagatattagaagaaataaaaggatttatcgtaaaaactgggaaatgagaaaagactaataaaaactatcacagaggtttattaaagtatctgcaggacatttagacattaaagagatatgcatcaaacttaaaagcacacacacacacacacacacacacacagagacagacagacagacatatatatgatataggaaacaatatttatgaagcaagagaaagaaattcaaactaaacccagaaaatgtataaaaatgaaaatgggtaacactacaaaaataaaaagctccaaagcattttgggggctggcgagatggctcaacagtgaagagcattgtgtagtcatccatagaactggggttggacttctggcacctatgtagggcagctcacaacgatctgtaactctagttccaggagaaattatgccctattctagcttccttgggcatacaaacagtgccagcaaaacactcatacatgtaaaacaaaataaaaaaaaaaaacagataaaggaataaagaatttgggaggccaatgagatggctcagtgggtaaaagcactgcttttgatccccaggtcctgcaaggtggacagaactgacttctgcaaactgctaatctgccgtctacacccatgctacagagggtgcacacatgtgcatatagacacatatgaatacatgcacacgcacatgcacacacatgaaaggaatacatttaaaaaagaaatttggaatggaagcaaataatttatattctactctcaggaaaaaaaaaaagatcatcatactcagaagagtcaaatattaggatgagtggaaaaatactcaaagagacaagaaaaggttgctgtatactcaaaaattatttctgaagtacagcaaatactaacagcacttatcactagcagatctacactaaagtaaactctatacctttacttaaggaaaagaaaactgttttagaaagacaatggcacacaagggaaacaggactaagagcctggtacacatggatgtgaagaaatgtgtatgagattttattattttaaatatctgattcatagttactagtaaatatacatactaagtatctgtggaaaccacacataaattggaagtattaagagaatcaaaggaccttaagaattttgatgactagttcaatttagattttgttaacacgcacagtaaaattcaaatgcaaacacccaaagaccagaactagtagaaagtaaaacatgaacaagaaaacaaagagtaagacatgatttagcaaaacaaaaagaattctggagactggtttcttagcaatgcacacatacttaccactgatgaactatgcctcaaagaggttaagatgctatgctacaagcattttagcacaatcatattttgttaaaataatgacacaaaagaagcacagtatgacaaatacaagggaaaatgaaacagaaacatacccatatacattagtaatcagaatagatacaaaggaccaaactcaccagataaagttagtttgttataccagaaaagcaaaatctagaccgtagcagaaaagcattgttaggaatacattactaaacaaccacagaactcaaaagagcaggaagccaacccattctaacatttagtgaattctgtaggttagtcttaaagtgcattgaaaagaaattgcctgaaatagataacattagaaaataaataaccaatcatcacaatgagaattttgatttcctaatcattaattatcaacaaggtagaacagtgactataaagacaacctgaaatagagcccatgcctattaaatatagcatctgggagggttataatgaatctgaggtcagtctgctttatgaactgagtagaaggctatcctggactaaagaaaaagactgtcttacaagggtttgaaacattctagtaagctttctatgtatagaagtttgcacactgtctcgggaatatatactttttctatataaaagatatccacaccacccacatctgtagcactggccacacccatttgggcgtggtcacaggtgaggacatgatggggaatgattttggtctggcgtccaggcaggtgactctctcgagcttccggtcaggtcacagggagcatcctgtgcagatccttaggtcaggaaactacagcggctatctacttcttgtttaagtgacttctctctgaaataaattatacttaatatttgaacctagtcccatgaatccttatgtgtgccacctcatccggtgcccaagccaggaacacgggcagagtcgcttgactagcccagcaggacagggtgcagctagtggggaagtggataatatgtgtataatgtacactgaatatttttaaaataacactaaagtctaagtcatgaagcaacctcaggagatttcaaacatacacaaatgacatgcttcatggcactgcaatgaaataataaattagcaagaaaattaaataatttcctatagggaaaacttcaagatgcatttataagaagataatttatcaagaagaaaaatgatccatacaaaaaatatataaaactaaaatttttgaaataaaaaacagcataatgtttcacatatactaaaacctggtactaaagtaaagctatatggaaactgttgtagaatattattttaagatgtattacatttgtttatatggtggaacatttgtttaatgatgcaaagatgtgttgctttcttttatgttgcacttgtttaactcttgaagctgtgttactttgtctaaaacacctgattggtctaataaagagtttaatggccaatagcaaggtaggagaaaggataggtggagctagcagacagaaaaataggaggagaaatcttggaagagaaaatcaaggagtaagaaaaggagaaggagaggaggctgtcaggggccagccaaccagctatacagccagccatgaagtaaagaaaggtatataggataaaggtaaaagtccagagataaacaaggataatttaagaaaagctgtcaagaaacaagccaagtgaaggccaggcattcataagaaaataataagcctccgtgtatttatttgggagctgggtggcaggcccccaaatgagccaccaagtaaaaaaaaaaatccaactataggaaacacagtctgaaacagaaaggagaaagagggcagattttacagagtccatataagagagaacctacccaataacaggaagaacatagtttcacccatttttgagactagcatgatcttatataaaaaagtcaagaaaagtaaaagtgtaggccaacttaattcatagaaagatttaaaaaccttattatgagcaaatcatttccagtgatgtataaaatccctagacaggagcttttgaattagactcaacgtatatagaaatgctaaaatgctagctctaccacttatcaccaataaccctgagcaagttaacacctcagtattcagcctcagtattagtcaaagaggaaaattaaaataacacataattcatgggtcattgtaaagatgaaacaacatgtgtgtgtgtgtgtgtgtgtgtgtgtgtgtgtgtgtgtgtgtgtgtgtatgtgtgtgttgtatgtgtacatatatgtataaaaatacctgatggcatttaaaacatcactataaacataatccacataaacatgacctatgctatcatattattattaaaaatgatacatgggtaatttggacttaaaatgtgtttcatattagaaaaactctgttaatataattcaccatacaaagaattaagcagaatcatataaatggtgtataggaatgaactctgtgtaaactcaatacttagtaataaaaattgagtaccaaaatagaaataaaaagtaattcccttaacctactgggaaatactttacaaaagcataaatagtagtaaacattatagtaaagcattagtagtaaaagttcagggcattttctttaaaatcatcaacaggttggtgcctaatgttactacctctattccacattattctgaggtcccagctaatacagtaagcttacagaagatggaaaccataaaagccccaagttagaaacaaagtagttattatttacagaaaaaaatgaaaagaaatctaaaacatatcctgttaataagagttcagcagtgttagacaagaactgctaacaaaagccggaagaaaacaaaaaataaagatatttaaaataggaaataatagaataataatttaaagaaaggcaaacaatttcatgaaagagcacttttttttttttggtttattcttgttattgagatggggatttatggatcctaggctgaccataaacaccaggtatccaaggacagccttgaatttctgaacttttaggcaacatttcccttgtgcaggagtctgtttaggcatgttcagtactggggactgagcacaacgctctgtgcatgccaggcaagcaatctaccaactgaaccacattataaaatttaaataactttaaatatatggaaagctattagaagactgcagcactggacagaaacagctttcgtgttttacataatcagcccacctaaacaaatgcctctgaaacttggggcctttcctatatgtgagccatagaaagtaattcataacgaattcaatagtgaggaaatgcatttaccctctggaggcatttcaaggtgaggctgcatgtgccctggcctatgggaacttctttgtgaggctggttatctggggcttaactgagacttagaatagttaatatttattccaaaggcacagagaagaggtcaagacatttctcttcagacttccaaggagactcagaaaaaaaaggagtggagagcagtattgcctttttcttctatcttcattaacacctggacaaacattttgaaggctcctcttctgtaacacagattcctcccttgatgataataatctgctatgctcttatttatgtgcatttccaaaataataataaatatacatgaactttgatataatgtaatatagttcattcttccataattgatcagtggtgaagtataattttgatttaaattccatcacagttttcaagggatatagactaatttaagagggaatttgctatatgatggaggtgccattgcataactgaggaaagaacaactattctgtccacaagcagctggttagctatactggaaaaagaaaaattaaattttatgacacagtatcaggcagctagttaggtatttgcaggtttggagtttaataggaatggacccatctcttataaccagtagcaggacttttgatcacttgtcaaaaaataaggtctgaatcgtatttctggccctggttgggtagatgcacattcagaatttacaagagtattgcctggctgaaggccttctcagaaaaaataaagatatattaccatcctgttccacaagagccaatccaaatggacctatcagtcacctggacaatgaaaacaacctccagaaacagctgttctaaagacttcagaaacagtataaagtctacctaagagtaggctgacacaatggcctcttttacgactgtcaactctcatccctggagaacatgctctgtgctataataaattccacctgtcttctaccctatgctgtgtgactgtctcataaggatacagagattataaggatcatggaccaaaggaagcactgagtaagatcccagtgacaacatggtaagcaaaaatgagtttctagtgtttagagacataaatatcaaagattaagttttaagaattaaggataaaatttaggagattatttttaaatctctgatttcttaatagtgtatgagccagcaaatgcactattaagtgtactgacaaatgtacattacactgtcaagctctggttaggcagacagtaaatagaaaagccactgacaggtatctttaacctaaacatttagtgaaaaacattagaaaattcaagaattcttataaacaacaaaagacaaccaaacagaaaaacatgtaaattcttaaggcattttgtaaaagaaataacataaaatgaagaatggacatgtagttaaagatacaagaccatttaaaaaattagacaaattcaaattagactataaagaaacttggagttagaccaaaatctcaataaagacaagactgactaaaataaataaatgcagcatatgaaacatcattaaacactgaaagttctgtactatatgaaagaatataaaaactggaatactggaaaacattttggcattattataaaagcaaagtatttgctaaactaattaaaaataagcagaggacctaagtggacagtgctccaaggaagacattcaaaagtcagctataaagagatattcaagataaactaattgccacagaaatgaaaaaccaaacccagaattagatatcatattacaactgtcagaatggttattacaaaaaaagacaaaagcaaataagcattggttaggaatgcaaagaaaatgaaatctttttccttctgctagtagaacattaaccaaatcgcttattattttaatattataccttactggcataatgtttcttttcaacaccaacgtcttttcaaaatatactaacatttaacactaaaaatactaaaaactgccaaacaacttgttcctaaaaatcaagatatcagatttttatgtttattatgttaactaaatttgactgtatagcactaacaagacatacaaactcatcaaccactaacattactacattattaaaggaaagagaacctctgtcatagccaagtgctattatactggccctgcttttagatggatctacaaaaaactaaaactccaactgcagtaagtagataaaaagtgtgctcatctaattcagtctcatctgtaatagcttcctcatcagtataaggttgttttattttattttaattccattttcttaatggcagtaagacttataatttacccccagaagaacttcattctacattaatcagtattttgtagattaaaacattaaatacaatttattctgtgccagaaactactgtctctcaacaggattggctgccattagtcccaagtttgttgttgttgttgttgttaatgacactaccaacttgtagttcatgtcttttcctacttttttctattgggctgttatataatcttagttacaaataaattttgttgtaatgcctagaaccatttaaatgttatacaaagttcttacaaaaatgactagtgttttttttttccccatgttgctttggaaaagaaaatgacatttaaagaatgaataaataaatcatggaggagaccttaaattataacctattagtgttcataccagcacattacaatgaaaatacataatgaacttatgtatcaaagatacatgaccacattagaaattagaaaatacaaatttagactgcaataaaatatcatttacgatgtaaaaatctgtatttaaattttttataaacattagactctacgatttgtttttcttatgtatttttcaataacattcctttctaagtcaaagcttttaactttccaaatgaacaaaagaatttgagttcccttattactagctaatgcaccaaaagaattattaaaaatgtagggggctgagagatagttcagtggttaagagtacctacactgctcttgccgaggacccaggttcgggtcccagcactccagtaccaggggtccaatgcctctggctgcaacaggcacatatacttaatgtgcacaaaacctcacccaggcacacatagttgaaaataaatctttaaaaaattaaaccatttaaaactaatgttttaggttactatgcaaatttcatttcaaatttctacagaaaaatatatattgtcatttattaggaatacttccaatactctaattataaaagatgcaacatttagaaacagctttgaggatccactcatatatccataccttatttagctcttctctttcctgctgcaaagttttgatttgtttttcaaaagccttgatttgcctaaaagcatcatctagctctcgtctcacagaattagcttcttcaagttgtttttccaaatgattcacttctgaaaaaaaaaaaactttaattcagatatacaatctaaacaaatgaaatgtagaatattgatatgcataacaagcaatagtatttattcagaaagagtagttaatttttattttccccaccttttggattaaaatattgacagttctcttcatttgaaaaattacataaaacatatttagcatattctaagttgccaaagactacgaaattggaaaattactgccaaataacaggatttttttctaaaatcaaagttattaaattatttaaactactatacaaaagtgagcctatatttattaaaatcaagaaagacatagcattgcataaattatagacagtattttaaagagagtctattctaagatgccagtaattcaggctgttgggttttcataggagatagcggtcattcatactccatgaaaaaaatgtctgttttaagaacattacaagtatgttattgtgaaatgctaacgacatactttaaaactcaaagcagtaaatatgtgtgcttcaggatattcctttaggtcccacctaaagaaaaccagcatttcaaatgttgactaaaacattatatatatatatatacacacacacacacatacacacacacacacacacacacacacacacacacagagttaggaattttaatttccattatgaagcctaccatactaatcattaaaaggtataagaaataaagcacttgggtagtctagtacttcacctgaaatgtatttactaactcctaaaaaccaatgtttacttataagcaagataaaaacttatgattttggagagatgtaactatgtaactatgagtgattttctcttcatctcattgtaaaattcccttttgtctatttatttgcctcatctctacatatgtcatttatcctttaaagaacttatacaactttatagaatttatatctatatcagtaaactgccagtcttttaatattttcagtgccctatcaaaacaagagtaataaaagccttcattatatgagggaagatgataatgaagacacagtatatgggaacatatgaattctattagaggttcactatggtgatcaaggtattttggaaatggcaacccataccaggtaatttttctcctcattccaggttccaccatacaatttaccatttaccaacataggtgggcttcttttgtcattgctagtccattaactgagcagccttcggggctggttctaagttagtagagacggaggtagggcacggatttggatgcccaatgccagggcaataacagggagtttaaaaagtacattatacataataaaactttcacttagaaaacaaaataacctttatgtttcttgcaaaagtattaaaaagagggcataaattttcctttatttatcctgtagacattcaacaaatgtatatttactatttgttatgcagtaccaaaagctgatataggcactagatatacagtacgaaaacaagtattgccccagccttctgagaatttagaatgcataaaaaagctgatattaataaaaccctagaaatcaaggattttattttaatttttctaagaagtagaagatatagctataaggaagtaacatatgaagtcagtcatcagttggtaggtgtcttgtatgcacagaccctgctcaagaagggtctgaggacaccagggcaagcgtcctgacacttttctccttcagagtcaagcaggtcttgagggggctggcatttacctctagctctaaggtaaaagtatttaaggagtatttatctaacaatgaatgaggtataactctattttcaactttaccactatgtcttcagtgttcaatacagtccctagaactcagcaaataatttatgtatgcctgaatacagaatgtaactccaaataaagactacctaccctgtcataatttgatctttttggtgtggtgaataagagaatagaaacataactggcagtgaaagaccaaagccccaagtgaagctctaaggcttcagaatggctagcctaacagtatatgaatttacaaaaatggacacagattgggactggtccactggcttccttaaaatagttatgtgatattttcatttgttagttaattaggacaaagtgatttaattttttttaaaaaaaatggatgaatgttaaccgtggaaataaacaactatatagctgctatggtaaatggaatagggatccttttgaaaaaataaaacaatatatgatgcacaatttcactacaggatatataccccaaaacagtaaaaacaggaacctgaccagaaactaagtttgtgttcataactgcattattacccatggccaaaaggcaaaagcaacctgcatatccaataacacacgaaggcaaaagcaaaatctactacatgaatataatgggacaatgctcagcttttaaaaaataggaagtagacatttgtaatgtagacaacctacaacagggacgacgatgggggacagtccttctgtatgctgtgaatatattctttctggtttaataaaacactgactggccagtagccaggcaggaagtatatgcagggctaccagactaggagaatgctgggaagaggaaggcagagagagagtcgccaggcagtcatcaggagttactgggaagataggacgccaggcattctccaggaagcccaaactacatggagatacacagattaatagaaatgagttaataattaagagagagctagccaataagaagcctaggccatcagctaaactgtttataatcaatataagcctctgtgtatttatttgggactaaatgactgcagtacctagcagaacatttcacttagtgtaatgtactaagtgaaatgagccaaacatgaaacaatgactaccgtgtagttcttctatatgaagtttctgaaagagtcaaatttatgaaagaataaattaggggcctgggttagtagaaaaatagctattgtttcactttgtttctattttgagatgatgaaaaaaagacaagatgatgatgacagttgtacagatgtgaaagtgctcactatttctcaatgaagtattaacagctgtcaaaatgataaattggatagatacattttacaagttaaaaagttaaaacatgatgaagggagggggaaggaaggaaggaggaaggacaggtattagagaaatggaatgaaagagaacacaggagtggctatttttacgtatctagcacacgagaccctgtaaggtaagaatttcaaaacaagaggactaaccctttctcttaacagtatctttactgatttatactaattttattctgccattgggaaatactttttaaaatgtaagtcaagagtagcctggcaactgtggaaattggaagacaatgggagtggaacaaagagaggaacccaggaggagctggtataataaatttcccaagataggatgatattctccatgggatacgaagagaataaagtttgttaggtgtacctgtacaaatagaatgagacagaaatcttaggaaaagggtagagatggtttcaaaagaaagtgacatttcacttaacaaacactgatttgggtttttaatgagacaagtataatcctataggcacttggaacattctagagaataaaatgacagacataaatcaatttaaacctgttttcaaagagcttgtgctcttgtggtgaggtgagggaagacaatgtacagacacaaatatgttaataatgacacgttatagggggttatgaaaaatgtttccagcaaatgaacaagcatacacagacagaagacagacggatggttgacaggtagacaagcaaaaggagagagaaatgacatggaaggtgaagggactcatgtatgaagcataaacattacacaggatcttggagtagttactagaaatacagctgaagagaaacacattcatggtgatgaaggacttctaatcagtattgagaaattcttactttatcctacaggtaaggagaatcccctgaaaatacatgcatgcatcctgaagctgtgacatgaacagcttaaaaaggtgactctggtgacttctaatttttgggaatggtaattggtatatttcccattaagaacaaataaaaaccccagaccttatattcaaaaatgaataaatgatcaatgaataagtaagtaagaacactaggaaaagtgtgttgagactagctagaactagttgagaactaggtgggcctgaggaatgaaagtagtgagctcccatgttttctttttatgtatcccagaattggacttttctaagagatgacatcctagaaaagtcaacacacctaagggaacacaacccccaaaatgctggtctttttagccaaaggaccaagaaaggacagtcagagactctgtctattagtgagggagaagaagacagcactcttacgcggagtaagagaaaaggcctgtggaaagaatttcaagttactttcatatgttttagagagaatagcagctggattgaaaaagattgttgtgtgatattttgtttgtgttctgacaaataaggcttgcctggagattagagggtggagctagtcactagaggtctaaacagataggagacaggaagtgataaggtaggatggagacagaatcttggcctgttcagtctgaggatttggagaggtagtaagtctctggtggctgcagctctgctgctctcatctttcagcttttaccctgatagctgactctgaagtgtttactgataagaccaattaggatcacacttccgaagattaagggttaaaaatcacagagtctggaacactaaggaaaattagttagaaggcatgcagcctggtgtgagatagccaagcagacctgataagagacaaataggccaacaatggcaggccagctggctaacctccatgggacctttctcctttgggaaaaaaccacaaggccctattgtttattacatattctttcttttaatatgttgtttctaatgcaaatagcttataatagattataataagagagaatggcttgtaaagtgctgggcctatttcaggaaagaaacaccagaccatcccacagataaagagctaaccagtagcattctagctactttttagtggctctgaaaataaatacaacctaacataatgaacagttagcaagacaccagcaaggtcaaaggatagtaatagtgttcaagtaacagctagtaatcaattaaggtcagtatctaagccagacccagagatacataaaggctggcttcaactattcctaatgtgtgtgggaaagcgtgaacagaacataatcatctccctggttagttcagggaggacatgcacagaacacatgggtcttctattcgtttaacctttgatggccccaggtaattaaccagtccccaaagagagtacatctgtctttgtccagtttctgccactgccttttaaaacacataaaaaataaaaggaaattcaacagctttttcttttcttaggtatgcttcccaactcttggaaattcatctcacttttccataataatacttaataaaggctgtttccatactgtttatgcacaaaagggatctaacttaattccactaaagcgagacaacaaatcagagccactgccccagattgtctgactgtctgacatcttcggtcttggcatcacataaagtgggccatgaaaggtcctgtcattctccaaaataattaacaacagataaataaaacaaaaaaatcttagaaaactactgttgtatttgacttaaacatcacagaaatccccatgacatggtggtacacacctataatcccagcactcaagagatagaggcaggcagatctctgaaacctctgtatcccatgctgacccatgtcaatcatgagagctgaatctgaattttcatcctgaagctacaaggagatgccaaagcatacccacaggggtggtgttttaaaaacaaacaaacaaacaacaactggtaaagattaagagttcccagagtgtcagtgagaacttctgctgtacctgtcaattaagagatgttggtgtgcttatgaaccacaacaatgaccagtatgcaagacattcctaagggtgtagtagtggtgctcacatcatcacagcaaccaacagctatctgatgagacttaaggcctgctcaacaggaggaaagtcatgtctttctctctctctctttttttttttttttttttttggttttttgaaacagggtttgtctgtgtagctttggagcctatcctggcactcgctctggagaccaggctggcctcgaactcagagatctgcctgcctccgactcctgagtgctgggattaaaggtgtgtgccaccaacgcccagcagtcatgcctgtcttaataatgaataatttaactagatagaaaaccaacgtgactatagaaaacctcaaaaatattctccaccataggatctaaaaacccacagaaacagctgacctgaacaagggaaaactcttggtccccaaactgatagctgagaaaccagcatgggactgatccagaccccctgaatatgggtgtcagtgaggagaccttggaaatctatggggcctcttatagtggatcagtacttattgctaccataggaattgcctttaggagccatcccacatagagggatactccctgagcctagacacaagagggttggcccaggccctatcccaaagaatatgacagactttgaagaccccctatggaaggcctcaccctccctgggggagcagaaaggatatgggatgggtagagcgttagttgggggcgcaggggaggagggaaggaagagggacctgggattgacatgtaaaataattttctttctaataaaaaaagggaaaaaatatttataaaacaaaccatctagaataacaggaatacatattcattacaagtgcccagggaatataggttaagataaccatatctaaagcataaaacaaacctcagtgtggtgatattttgtttatggtttaataaagcttgcctgaagttcagaatgcaaagctagccagagccaggcaatggtgatacacataatcccagcagccatactagttagtcatagaaccaggcagtggtggtacacatctttaatccaagcagccatactagttagccatagagccaggcagtggtggtacatacttttatcccagcactcagaagacaggcagatagatctctgtgagttccaggccaccctgggctacaggagagtgaatcagtccaaaagagaaaccgagctcacacctttaatcccagcattagggaggtggagacaggattgatatggctgggtggagaaaagaatataaggcaggagaagacaggaacacattgcagtctaggcagtctgaggagcagtgcagtttggagatgcaatcagaggacactatcgacccctcaatctgagcattgggagaggcgaaaactctctagtggctggcggctttgcttttctgatcttcagctttaatcccagtatctgtctctggggtttttattatttgtgctacacctcaacaactgtaaaagagctgaaatcataaggggtattataaaactgataagagaaatatagaagttaatttttcaaacgttcaaagtaaacaacatacttctcaatttgaatcaaagccaaaaaatttaaaacattttcggtaaaatgaaaatacaaactgaaatattgtagggcacagtaatgtcagtactaaaagagaaatggatagcccttggcgtgtatgatttgacacttggtgtttatatatgtgctattctcttgtctgcagcaactcttctcttctgcaaacctcacatctactctccactcatatatgcaactttccagacaaattctcaaactaaagtcgttgtgttagttatctttgttctctctaggtgggtgcacaatctatgtattctctatgcacctttttctactttccctaaagccccttcatctttgtggcaattgtgacttacatatttactttccagatcaaatcatgaacttcatgaaaccaggactaagttttacttgcctttccttcagtgtcatataattcataacacgtaacatcaacaagacagttatgtgtgtgtaaaactagttcttaaaatctactaatgatggacctcaggaagtcacctgatacttgtttccttagtttttcaatctcttctttcaggcttttaatttctaagtctttgcttgctgttagtggaccatcaacagttgaatattgcagagcttgaacagtctgcgttgactctgaaaataaagaagaactaaagaatcaaaatcagagacttaaattttttaaaactaatgtcaacatatctctacacaatttttttaatagttccactgttcagaactgaaaaagcttaagaacaccttaaagcatacagttccattgtacctgtttacagtttgtaaacaagatatccaaatatatagactttaatgactcaactttctaatatatgtatgagatttgaggcttgaagtactattgaccaactaagacaaagaattaactattcagacttttatgtttctctcctagcagagaccatcatttgatataaaaaaaatcacatatcatataacatatgaagaactgaataggacatgaagaaaggtttagatgtactttttggcatagagacattctggatttcatataggaaattaaaggattagctacaggtgatttggcttttcaatttaattaaaacatttgatagaaagagatcaatttatcttgaagttatatgtagaagatgaaatgtataagcaacatgaacactataataaggcttatttcccaggtactagcaaaagacaaagaacagtttatatcagaaatgaaacgaccctttgtcctaaaaacagcttttctgctattgatgaaacagatcttggtgaattagcacaaatcacacacatagataaaatatgtcaccatgcttatatgcagcatggtcatcaataagcatttcttagcccaaatgaaaagtgtcagatatactacatcatacattgatcacaacttcagtatctaaaacatattttattcaggttaacattttatttagtattaacattgatcctgttgtgtttatttggaaaaggacatccactgttttagtttatttaaaagacacttaaatttgggacttggaagacagcttagttagcaaactttgctttgcccaaatactatatataactcatgtgtaacaacactctcttagaaaaattaaagaattcatacatcaaaaccacactaaactctaagatatagaaagctctcatggctattgctctattgttccttttgtaacaataaaaatacaccaaataatttttaaatataaaactaagcatgcaaaaaaatttcatttgtaaacccattatggaagtgcaaaagcaaagccggagtaaaatgaaccacagaggagtaagctgttgtaggatgaaaggctttgtccaggctgaagcttgacctaaactgtggaacatttttaatatttgtttgcttgcttgcttttgaggagtgttacaggtgtcagtacacatgccactgcactcgcacagaggacagaggacagtcttcaacagtcagttctcccttctaccatgagttccaaggattaaactttactcagtaggcttgtcacaggggcactttcctattaggccagcttgttagccccttaaaactgaggactttcatgttgaatacaaagccaccaagccttctggagaatgtgggggtaggggactacgacactgtttagggaaggcattcttgtcctattagtaagtatatctgctgtatttgcatcaagtcaggacagtctcctcaccaaggtatttaattattacttccagatttggaagtaataagatgaggaagctgaagaatagaacaaatctcccctagttacaagtgaaggagaaagataccctaccaggcttatcaaatccttcacttctgacattagaggtggattgaattaataaaaattgctatccagccttgttcaggctcatttactgattgaatgaagagtgggaaaaaatgttctggggcaaaaatagcatttactcgattgtcttttattttcacttatattagtcacacaatttacgttacaaggcatttgtgggcagcaggagaacatgaccaacaatcaaagaaagaaaaggtagcagcacacacacagacaactcaggtgtagaaatcaacagacactcgcaatgaggaacaaaacacaagcacaaaagaggaacacaggaaacaagggaatccttacagaaatacagcaaaagcctccaaacagaagcatacagtgagggagcaagagaaatatcatcactgctcagagtgagaaaggagggtgtaaaagaactgtgacattgatttcagggttctgagaaactgagtagattaaggaaagatcagaatcactgcagaaaagcagtgaaacagttagaatgttaacgtgtattttaaaatcatcacagtgtatgatggtaacaatgtgtaaggactgatcacgtatgatatgaaaagtcactaaagtgtcatgtcagggtgagaagggttcttttttcatgaaagctccactctcccaaccccagaggtattctattccatacatttgcatgtacacatctatatctatagaaatacacatccaggtgctatttactattgtgtaatgtttacataaatggcattatacccttttctccatgtatttctacaactacatttttttagcatttacaaaaagattccttctgaagaaaagccctggtaatgcagctcaaaacactgtgagttcaactcaaatgaggaaaatattaaaatacttaccttgaagttttctagtaagttcaagcttttcctgttccagccgcttaattcttctttcataagcttcagttgctaagttattatctagagtcctctggacatttacatcaagatccagtgaagtgggacctgctgttaccctcaaacagctccggtcagaaagaacactgaatgaaaaaaaaataattttggctcatattgcaataaagtttgaagaagaaaaaaaaaagaattttaaaattcttcatatttgaatatctatagtaaaatatctagaataccacggaatgattataattttttctgcaaaattactgtaagctatttgtagaactattttaaatgaaaacttccatcaccaaattatctttcaatttaaaactccataaattataaaacaaagttactgcagggttattagcagtttaaaacaatttgacaagtttactgaaacagtagtcaaaaccatctgcatgtgttcattaatagaatttgaaattcaaaacttttaaagtggggtgcttttctgaatgcacattaaagatatttgagatgatggcattcaccagtgaatccccatagacaaagaactacagcaactaatgatagctgagagaaagaatcagtcttccttgggcatgaactacctaattgtttatataaaattaggtagtcagctctgaaagcctatacacacaagcagcactgagtggtttcagaaaagaaagtgagtgtgtgtgtgtgtgtgtaaaataatcaaagaaaaacaggtcatcaatttgagagggagtggggaggtgaacatgaggagttggagggagtggacataggaaggattgcaaggaaggggacagcacaatgatgtaactgtattttaatttaacatttagacagaattcttgccaatcatttaaattctagcaaaagggatagaaataaaagcatgcaaaaagattagaaaatgttaactgctaaagagaaaatattaagtaggaaagagagaagtcttaagagagagaagacagaaatttagaaggagtaatcaggaaagctgtgctgatgcaggtagctgaggaagttgagtcaaggtaccaggcaaggcagtgtcaggatgaagaacagaggcccaagcatcccaagacaaggctcttgggccttaaggaagtctatgtaaacagaacatggcaaacaacctgaagagcaggaatagaagatgactgagacagctgtacagggccttataggaaccttggtttattcttagtatacaaagaaaaggggattgggaatagagggaaatggccatgaacagggacaaaaggctgtcttattcatccaacagggcagttctgatagatgtaggaaataaaaggagctatgaacatattacacacacagttcagacaggttttaagtagaaggcaaggtgatgtcttgtcacagggaatgtggaagggtagttccatggctgagccctagaacactttgatccccagaaactggtgagaggatgactcatgtttggagactgagaaatggacacaaagttaaatgttttcctatggagcagtggcaactgtgaaaaagggcaaccaagactaggactagaagtaatcactacacctgttaacacaggaaccaacagaggtgctggtaaaagcagtttgcatgaagtgattggggcacaaatccgaaatgagtgcattcaagaaagattagtattaaaaatggacagttaagagaagtaattttgttacagaccaaagaaataattggtatcaggaatgagatccagaaaggctttatgttttaagatggaagaaataactacatgtctggtaaggcggttggcaggacataatgatgtgaatggcatgtaaaggagaaaaacctatgacataaaagtgaacagtacattaagccaagcaggaaggaaggggaggagccatcccaagccaagcttcttcatggtccatccttgaaaagaagagcttgagagtctggggacagatagaaaacagtggcaggcacttgcagctgttgtcaactatcagggatgaagaaggcaagttcatcagtggagaatgagggtgaccaagccttgcaagaagtatgaaatggttaccttggtacatacagggcagaacaaaccaatacaattccacgtgtttgtcacacagaatacgatcctcaaagctggtgaacctcaatgaaaagttagcctggttgctaagaaccatttgtctgctccaaccactttgaattgcttagattttaaatgtaggacattcactcaactaagaaagtccagcagctgagagatagttaaaggtactgccttggcacacaggaagtgattaatataattcttatgggacattgaagggagagatgagaggacagagcggagtgaaaagtaaagaatgacatgaacaatgggttggaaattttggtgcttgacatatacagaatattcattaagtgcctttattgctgtttcctgccctgtcccaatgggtatgacttgggccacttgtcctcatcatttccttcttgggtagtttattctatttataataccaaaataggcttatcctttgttttttcacatttaaatccatctcctcgccataacaaccatgtatataccattttcaagcttcaatttacttaacatttttataagttacccaacttatcttgatttttaaaacttaccagctactagtatatgtaaaaccaacaaatggtaggtgatggccagaaaatgcagcgtgtgttggtggaggcattgtttcctaaaaaagaaaagaagaataccaatctggtaagaaatctatatttacagctcttaactatcaatggggatatataaccattcagtttggtagagatgttcagtgatacaaaatgtggactataggtactgctactacaaaagtcaaacaaataaagtttaaaaggcctaacaaagaatgaaattatagtcattatttgtgtgttctgtatctgaaaatttgtctagcttttttttttttttctatagagacaaggcctcactacatagcccacactggcctcaaacttgtaatcttcctatgtctgcctcccaagtgctgaaattataggcatgtttcagcacacagtttaaaagcaaaatgtatttgcaagaggacaatctatatcctcagggcttatgtggtcactgaagatgtgtgtagagtaggggatgcgtgatgccctttgctcctcctgctgagactgaacgtggaatgctcctcttttctcacactggaagcagatgcccttggcacactctataaacatttttgtgtcttttttgatagtatctctgtgtaaaatagctcccagaagttctgactgataattgctcttattttatttttcttaaaatttcaagacagagtctggccttataaccaaggtagacatgaacccatgatcctttccatcacactccccaccagagtgttaggattagaggtgtgtgataccacacctggctgccatcaaatgtagcaacacaaaaaagtaatcgtgtgccttttcagagaaaacaacatgtgttagataaactgttttaggagtaagttatagtactattagacatgagttcaatggtaatgaatcaatggtatatattattatatgaagtacctttaaatagaagtacatataaaaagtttttatattcaaagttgttgaaaatgtgaccagaggctaaccttatgtttctttaatttttggagattataatataattacaacatttctcccttccctttcctccctccaacagctcccatatacacctccctactctccttcaaattcattaaccttctatttctacagagcaatggtcaatgtcaactaacttggttttcaccataactttataaaatacaactactgtgaataattaaaatcaactgtatattcacttaacttggaatgacccaaaatttctgtcaacactgaatataatttaaaaactggtgaggaaaatctatctaattccttcttatgaagtttaaataatctaacagctcacaattaccttgaacatagtaataaagcttgcctgaagatcagaatgcaaagcaagccacactagtcagccaagaggtcaggcagtggtggcacacacctttaatcccagcactcaggagacagaggtaggtggatctctgttagttcagggccactctggctacacgaaattgatccagtctaaaagagaaacagctcacacagagcacttgaagtggcatgcctttaatcccagcactaaggaggtagagacaggaagaatatggctgggcagagagacgaatataaggtgggaggagacaggagttcaaggcagtctgaggcagcagactgagcaagcagtctgaggattcagtctaaggatgcagtctgaggttttgtagagacaatattcagtctgaggattcgtggagacaggatcgccactttggtctgaggtagaggtaagaactagtggctggctgctttgcttctctgatatttcagctttcttcccctaatatctgactctgggttttttattgctaatacagattggaattcaatacttaatgtaacagtaaaatgtgacataaaattaatataaaatttagtattgaactaaaaccaaagatacaaaattactgaataaattaacagcttaaaataagactagaaaaaaaaaacccaaaattttaggttctgattttcttaaatttgagagcagagtcaacacaatatgctggccttgttacagtccatgaactgagaggaggaactatttggctcaggcagagactacctcagataaagaagactatggggtgaatttccatattcattccctacccagctggctgttttagtggcaacaatatgggtgttggatttgagccttccaaataaagtgtgcccatctggcagcaaggcatcagctttttgttccatgctataagcacaagtgaacaggtgatggggtgagaggtaggaggtgtgctatgtatggtttcaaataaagttcagtagtttttcatgaataaatatttatttccttttggctatagtaagccctaaaacgttttgccatgtgtttccagtttcatggttgattttatcttttatttttttttgggggggggacatgaaatacactttttaaagcatctaaacttgtcttcttaggaaacctacttacacaagtagctaaggaacaggtcatgagtgactatactgaattcagttaagtctcttaattttttttttttgatacatgacagaaaaagcactggaagtcattaactactgtgtgactgataagagaaaaataatcctgacaccaaattaataaacaaaaatgttactttataaccatacttataaggaccagaaagacaggacatcttcatgtcatacttacagaattttttaaacagtcatcatccacatcaaaatttgatgtatctgttgggctactaacttctggaatataaggtgcttcacagtttcgaatattatcccaatcaattccactgaaaaatggatgtttcttaaagtcttctattccattttggccaagtcgatgttctctactacaaatgagtcttcgaataagatccttagcattttcagacacatcagtcacttggggtggaaactgaaacctctcctacacagacaacaatataaggtgtaaatacaaatcccctgtgtacttacaacatgatagcaaacttgtttaaacacatttccttttgaaaaacatctagtgtttgatagcacagagcattgatactgttgggaggtacagggataatgagaaataaatccttttcctaaaagaattaattctcttaagtgacttcaagacggatgaactacaaaaagaggtcagatgctataggatcttaagctgatgttaaaatgagatggatctgactaaaagtagcagaatttaactcaacagcagttcaaaagaacacagattattgataatgtccaggtacaacataaaatatcagttaatcattaaacacttaaaaatgtaacaagtatctggcactattcaaaatgatttacttatttaaccatttaatcctcacaataatcacactgggtaggaactactatgacgacagtcttgtagaagatgaagctgaggtatacagtcattgtttctcaatgccatacaactaataattgacaggaagggtcttgactggaactctctccacacccgtgtagttaaccagcatgctgcactgcagctacttccttctgaatggtacacatgtgctttccaccttcaatgtctccctatcgtgcagttcttcataactacctactgctctagctatgcatcttggtggaagatataaaatctataaaattgatttatatgaataaaacaccagaacctattaaaaagtacagattatcctattcttctggggacattcagattcactgaggacttttccaactgttcacaatcttctgtgactggacagtttattcaattctgcacttggtgatgcagaactggagttttgtgatcttgttcctgcatgcagctggagtgcagccagtgggctgtaatcattaacactgggacagatattccatatatgtatttttgttctaaatatttccaccaggtagacttctagatctgaccttgttccatcaaaagctcaaaccatcatcttaggctcaagatggatacctgttaactttgtgagaggaagttacaatatgtagtcctgacagtggaacctgaggagctcccaagttgctgcagtagagtataatacaatgtttcatttgtctttgccagtttgacagaagaatttcggttaaacaaaactgcagttgtcatgtgtgagtccatggttgggtgtgtgtgcacaagtgctgagctgtccatgggaaggtgaggggacaactttgtggggcgagttctctccttccatatttccatgcatttcagggactgaattcaggtcactaggcttgcacagcaagcaccttagccacaaatcatctttctggctccaaagaatctcaattttatctttattcacacttcatttactactaataatgctgataattttatatgcatgcttgctatgattgttcatattatatagtaaaaactaataaaactaactacttttaaactctgttactcaactatagagaccaatgtttctatttaggagcacttccaaacaaaatatatgaaaaagttaaaactaattattcacagattgtggttactaacaattttcccctggtatacaaaagaatatgacttttcatggttgtgaaaaaagtattttctctttactatcatgtgactttaatttactgtatgtatttactgtgaaaattgtaagagtaaatatactaactttgtgattcatgatttttccatatgtctccaccagagactcagcatagaatggtgtttctccataaagcatctcatacatacagacccccaaagaccaccagtcacactcagggccgtatctgccttttccatcttccatagcttgaaggatttcaggagaaatataatctggagttccaactgccactgaggactggacctgaagaagtgtatatttttattaacatactatattagagagatgattttaaattaaaaagttacttgagaaatatacagcaggcagtaagatttttgttatctgaatttagtctcctagtttacagagtaagactttagatgacctctatattaacagctttcattactcataacctcacagaaccttcactgtagctgaatgcatttaagggaacaatataattttagtcattacagtcattaacaaaaaatgaatatttcaattacaacattactattaattttgttttggtttggctgtcagagacaaggccttattatgtatttgaggctagtctcaaactcacaatcctcctccctcaacttcccaagtactaggttacagtatactactatatttgctttcttactgtttttaatatttatctgtgcaatcattatatatgcatatatatgtataatggaactgaaaatttgcaattagatatgaagagaacaactcattcagattaatactgataattttaaattcctataaagaaacctaagaaaactaaaggttgattattgtacattaagttcttagttgcactggacatgatagtacacacctccttaaatattaacactgagatggatctctatgagtttgtggccagccttgtctacatagcaggattcagactagccaaggagatcatagagtgagaccttgtctcaaaaaaaaaaaaaaaaaaaaaaaaaaaaaaaaaaagcaaacaaaaaaaaaacttatttggaaaaaattatagaagggaagtataaaaccaaaattcttaattttaagaagttgaaaatacaattacaccaagttagacagatgaaaataataaatgctcattttatttttagtatctggaagaaatagctatctattttacactcctactgacagtgcctagggctctcaatcatccacacccttgacaacacttgctgttttctggtttggcagcagccatcccaccaggccagagatgttactgtagtgggatcacaggctttctgacttatttttctaatgacaggttctacggagcatcttttcatatgcttactcctcattcgtaaatctttgggaaaattctcttactcttcactagggctgtttttctgttgttgagcttgggaacaaaagctcctgcagaaactaccccttacactgagccttgcacaagtgtgattaactgattaagacttcagcacctgtggggccgttagagtgctgcaggccagaacctaattataatccgtggctgttccttacatcttcttagcatgtaatcagataagggattgggaaacactgtttagctgtctgctgtcttttcattctgcccactatgccgtttgatgcacacagagtttgaagagaatagaatttaccatgatgggtatggagaggggttgtgattctgtgttattcttaagaaatttgccaaatacagtcataaatattgtcccttatgttttctaagaggttttttagtttttacatagttcttgacctatttttgaactgatttctacatgtggtataaagtaaaataagttgattgtttagattgggaatatagtaggaaaaatttattaactctacatgtaaataaactataatatttttttaaaagctaaagagaggcattaaaatatttaaatgagccaggcagagtagcatgtctttaatctcagcattcaagaagcagaagcagatgaatctcggtgagttcaaggccagcctagtctacaaagtgagttccaggacagccagagctacatagtgagatcctgtctcaaaacaaaacaaaacaaaacaaacaaacaaacaaacaaacaaacatattaaaataaaattttatcttccaagtataaagagagtaagaaagataaaatacactgggcagtaggtaaacaaaagcattcaggcaaataacaagcaaaacctaacagtaatagcacaggctattggactaagtcacaatatccaagagtagattaaagaacctgtcaagggacagagatttatcaatgaaaaacaaataagaccaaatgaataaatgagagaaaaatcagttacataatttaagtaagataaacaaaatggaagcacataaattgaaagtagtaagattgaattacacatacattaaacgaaatttaaagcactaataaaatattagcaagttattaagattattttaattcatcaatataattacaaaagaatatatcctggaaaaagtaataatttcaaataatacattacaaaggaggtgacacaaagcactgataattacaaaggaaaaattaacaaatccactaatacagtaaggattttcaaataatggttaatagagaaaacccataagagtataaaacatgaatgcaaaaccaattaaatattatggacatgtatggaaccctgtactaggagctgcagaaaatatattcttttcaaacaaatatggaatatacaaaagttgactgttacaaaattataaagtagatttcaacaaatgaaaaaaaaaagccctaatgtaagataggactattttctgataaagtaaaaccagaagtatatcaccaaactaactaaaatgatactaagaatagtaagaggtgcatctcagctagcctggcggctatgcaagaggctccagtttgaggatcaacacccattactatgtcctactaaaggtatattaactcaacaaaacataggaagagcatacaaccagacttgtaaacattaaaaaacctgaatgaaacttagtacaaaaccacctgtaaagctaaacagaagtaagcaagctctaaactgcttaagaaacagtcagtggatgttctatacaactgttcaagatccaaaatgagtacaggtggggcacaggtatgctattgctccgtaaggccctcataaaaagttaatgcccaaacttcacggtgctggtccaactcctccagcactgcttgactctctggtctgctgttctgtgtccccgtggatgtcactcatctatgactctacaatgcaatgtgtgggtggtccagcctttatgagtaatttggggaactttaggcctgcctttacacacacacacacacacacacacacacacacacacacacacacacacacacattatatatatcaataaaatctgaaaatatactcttttaactgaacaagaacttaaggatttagtcagcaaatgtcaagttggaatacaaaattaatgctacctagtcttcacccaaaacacaagatccgttagctgaacacagcccctgacaacaactatgtcattagaaaaaggcacacatgaagatggagttgtgctttctttttgtatatgaaacttacattctttgttactttagaaacttaggaacgtttcgagtttaataggtagtagtgaaaaaagaagctgcaaggctctcaaagcaccattctcaagctggttattacaggcaggtaagatgctctgagcatagtattatgagcaagtatgactgacgctttgtgaaaggaggtgaagcacagacaaatggacgactgaggggcagacgtgaaagcaaagagtctctagaacagagaaagaagacctggcaaggggaatgtctacgggcagaattcatgtttgtttaccgttccatcttccatcagcttcagacaagaaccaaaatctgctaaccgaatatgtccattcatgtccatcaatatattgtcaggtttaatgtctctgaaaaaaataaatacatttaagttttagttggaaaataatcaggcagccttttcacatgaaaaaaacttcaatttcttttttaaagaatactctttaaaaactgggttttacagattccatcctagctgtgattcacattaaaactttctaaaggttttatcacttcagtaattcctggaaataaaagtactatgataattttcattctgtgtagggtgcttttggggaagaaagcattctttgttgagaagatgatcacgcaacacacagacacgtcacagtgcactctagtgacacgacacacagacacgtcactatacactctcgtgacacaaaacacagacacgtcactgtacactctagtgacatgacacacagacaggtcactgtacactctagtgacacgacacacagacacgccactgtacactctagtgacacgacacacagacacgccactgtgcactctagtgacacagcacacagacacatcactgtgcactctagtggcagcacttttatcacaagtacctcactttaaaatacagggaaagtaagaggctgctgtagatgtgataatggaactttgggggggatttatactacatttttcattttataaagtatttttagctttcccacacaagttgtttctcctaaaatgtatttcagtggtgttgatttttctaattagatatttattttatccacttctcaaattagaatgtagctggtgacttctgaaatctatatactgtattagtagttccatatctaatattgatttcttgtatttttgttatttttgccattgtcgtttggttggcttacactctaaggcacaatttcacctttgaaattgttaaagctaacctcaactcaccatgtcacccagactagtactgaactcctggtaacttacttgctgcgtctccatcgtgctgtaattataggtgtgaactatcacacccagcttctcttgcatttttataagattaaaactgaaaccttgtttactgctttgcactccatgtagttcccaaagcaattgccagctctccacagctgcacaggtgggtacagtcatctaccctgtctacagatggagcagctcagacacctgaccttacattcaaggcctctgccaaggtttgcaggcagacagcctgcctccagattccatgttctatactagcaagattcaaaccagatagctgtctttagtgacaactcactagggactaaactagtgacttttaatgaagtgtttttgttttagtggttttcaaatatttgcctattgctctcttcccttacttctgtattttttattaattttaattaacttcattttacctttttcttctctgtaattcaagctaattttgttatctttcccagcttcctgagttaagagacttaattcattttcacctcattccttttccaatattttcgtttaagattagagagtttcttttactgcagcagtttctggagctgtgtcccacaagttctgatatggagcacttttactttctcttcattataaatattttgtaattcccattgtgatctttcagccacagcttacagagaagacatttagaactaactgcctgttacctcagcgctctggaaaatcaagagtaggaaaaaagaatcaaaggaaaaaaataacaatccttatacaaggctttcctgacatctcagaaaggaaaagtctcgattcataaatctctattcacctttagggtctccacaacaattttaattttaaacccagtgttactggttggttaacagttatctcccccttctatacagaaagagctatgaaggcccacttagtctgcagtgtttttgtttttgtttttgttttttttaatgctctaatgaagcttgcctgaagatcggagtgcagagctaagccactagttagccacacacttaagccatagagaacaggcagtggtggccacaacttgaatcccagcactcaagagacagaggcagatggatttctgtgagttcaaggccatgctgggctacatgagagtgaatcagtctaaaagagaaacagagctcacacctttgatcccagcacttggatgacacgcctttaatccaagcactggagaggaatataaagggaggatagacaagagcaatctgaggcagtctaggcagaagggagtctgagcactcatggagacaggatgcttgtacgttactacgttgcatctttcattcatttatttgtagccattaatgaacctatcacttatatattacggttttcaactgccctatgttttcaaaatactggcacattcctttctattacaacctcctaacaaattatttccttatttctcaataaatgccttgtttctattttcctctattctttgtttgtctctattagttattccttcacattttacccccagaaacaattcctagaatatataaagagcagatgagcctgagcatcttggtataacgctctgaaatagtaaataagtggcttttcataaagccatgacttccttcagaagaaaacagaagtgatgtcaatgaactggatgcagcagggtctgcagcctgggacgcagggactactccaaaaattttgagcgttaattattctttaaaaaaaaaaaaagccacaaattccagttttcctacttagtgtggcttctagcctcagagtactaggccatttgacaagatgacaggaactcatcgaaagggaaaagaagaaacagttgctggtgtcattacatctggaagttccataagcctcctcaactctaagacagcgtcatggaagcaccacctgctgcacatgtaagggacagagtcacaaacttcattattcctgtctctaattcaccacacaaaagggggccataaagatgtctaactgaatttttaaagttcacattcaggggctgagtttatggctcagcagtatagcatttatctctcagacatgatacatcatttgatttacaggaatactggaaatgtgattgtctagtatttggtacatatgaatgggaagaaaaaagaatcaaagtattagcaaagaaatgtaaaaattagaggcagttacacacagagagtatttctggctcagcaatacacagcatttaccaagtctcaaccatgttatctctacagagacgcataaagaagtagcagatctgtgagagcctaaggaaaagcagtgctagagtaggagccacaatcctgagtcaggttaggagagtccctacgagtccttccttacaatctgtctatagttcctaagtctcgaaacacctgaaactagatgttatgataccagacacatgggaataaatagtagaaggacaaagctttagagaaactagatatcactgccactgcagagcaagcttaagagaggagctacttttcagtataatcattttttcactcacagtattgtacatacttatggaatatggtgtgatgtgttcattcctatgtatatctccttcagagcaacagacagcctcttcccaattcctatccctgtcttggaacagcacatatgtactgaacaactgatgtggaaagacaaagaactaacaattttgaccaagttaacaatgactcagaaagtcacaaaccctctagaattacagtagtgctgactgaagctttggcttgcaattgtctgacttctttttccacccaatcctggtcctccaactcctttccgtaggcattaattcctaatgaacattctcataacacatacagactcagtgtctgctcttggagaacacattactgctaagtgtaacaacaggacaatgaattacactttctgatataagaaacaaaaatgacatctggcattcagatcaatcctgagtcagtgacacatagcaataagggggcagcaggtcaaccagataccaagcactgtcaacaaaggaggaagaggtaagctaaggcaagacatcagtcacaactttcacaatccatgcaaagtaagagaagtgcttagaaaggaggacacttctacattatcctcataaatacatcattccggtctctctaatttgaatatcactctataatcagttagctacaaagcttctaaaatcattagctttccttattaatcaaaagcaaataacactgggcttaaaaagaacagcatgatggttaaggcactccagcccagtgtgccagacttgactatctcagaagagctttatttcaagacaacaagattattatttataaaaggcacacatctttatcttataaaaatgtacttatatacattgaaaggaagccaaaagtatgatcacacaaatattatcctgataataataaaatgtgaatttgtcagtattagttaacctacaaagtaacaatttttaactctggctaaccatcaaattaactagagaggttatttaattccactccataggccacaagccgaacatcgtgagtcagaatgctgcgcaaggtcctgccactgagttctaagttaagacctgtatttctccttccataagcataagcatcttgcccaccttcccacatctgtactgttcatacagtttggaagagtgactttcaaaagaatgtgtttatttttactttttggtcagactatactacttctttatatactacatgttttgaaaagcatactgtattataatacacctgtactgaatgttaaaattatctcttaattttgctaaaactattattgtgtccatagtaaagagggaaaaatctacactgataaaactatggccctcttgagcttcaggctttaaagtagttcaagaatatgtaatggtaatgatttttcatataccaagtggataactggccaataatctgcaaaaacccatgctagaggagataatatcacgccaaaacctgaaaaaggcttggcccacacctattcttcatgaagttctaagggacaaaggacgaaaccctctctgaagtttactatagggtatttcaacaaatcctattaaaacagcactggtctatttctcatggtccataggtgtgctttagtctaaattaacggcattatcttacattaaaataaaggagagaagaataataaaattgtgagtcttaaatatggaacaaattatacaaggagaaaatgggagtatggagaaataagctaactctggtctttggtttgggggttagggatgcatttttaagaatatattacattctaaggctttatataaactactatctgagaaccgtggtggtggtggtggtggtggtggtggtggtggtggtggtggtggtaaacaggaacatgaaaccattacgtttccccaaatctgtccaattcaccttcaaaaacagattttattgacaaaaagacatgatgtcaccctagaaatcttaacctgtttgagaagccttgtcttcttgtgagactcccaacagtgggagcaggggctgtccctgattgttgtgcctaattttgggacctcttttcctcctactgggttgcttcctccaaccttcacatatggggagggccctagtcttactgcaacttgacatgccatatctggttgataaccctgggaggcctgcccttctctgaagggaaaagagaaggagtggattgagggtggggggccatgagggaaggagggaggagaactgcagttctccttagagaatttaaaaaaaagatttcaacttattctgaaacttgggttttttcacatgaaaaaaatatacaaggaaaaagaaaaggtaaccaataaaaaaaaatatggaaacttgtaaattgaaatgggaagttttctccccaggtgaagtttatttttaaatttgtttaatttattattgctattgggggagcacatatattccatggagtctgtgtggaaatcagaggacagctttcttgaatgagttccctctttaaaccatagtttcaatggattcaactcaggaggtgacaagttcttttatccactaagccatcaacttgtccttcttcacttccaaacaaagtttctctagaagtctttattttaattacatgtatacatatgtatctgtgtgtgggtatgtgtgtttgagtgcaggtgactgtggaggcaagaagagggattcccctggagtgaagttagaggtgaaggtcagtcacctatcgtgggtgctagagagaacatacacttaaccactgaaccatgtttccagttcctcaaatataatgtcttaaccactatgagtctttgttccttttcatatcttggcatcaatttatgtattcttactttatgttacctagatcaattacagaaaaggaaagtaagaagacaaggagacaggaagaagaagaaaacttgaatgggaaaaaggaaaggcggatcagacttaattatcaggaaatataatctggtaaatattcaaagaaataatgactaatataaccctttgtgatagacacaattcacatcaagtgttcctaaatatgatttaacaaaagggatgtcatgttgcagtgatctaatccataccctgtaaaaagtcctttgaaaactcaaaactcattctagaagaagaaatccttagcaatgacacatactaaattatatccaataagcacaaaaaggaaaaagtcatactttatgctttagcagctaccaactgatcaaacagtacattgtttatataccttgcctcattcacctgtacccttccagggatttttacatgcaatgaagtgggtctacattctatcacaggataagcatttagtgctcactttaaatatggaacttcatgtccttcagttggtactaggtattgtcagtaggtactaggtactagaattctcagtaaaacaaagttattattcttgagttctttatatattttggagataagtctgaagatggaagtttcagtcccacctggtcccgcagccaattagttccaaataaatacacagaggtttatattaattataaactatttggccaatagctcaggcttcgtagtgattacctctcttttaattattaacccatttctgttaaactgtgtattgccacaaggctgtggattatctgtaatgctctggcatgttactcttttggcggctacatggcgtctccctcaactgtttctccacttttccccttcccagaattcacctagtctggtagccccacttatacttcctgcctggctaatggaaagtcagcatttattcatcaaccaataagagaaacatatatttctagcatacagaaggacatcccccattatcagccctctgtcagatgtagggttataaagatcttttcccactctgtaggctggcactctgtcttactgaccatatcctttgccttatagaagcttctcagtttcaggaggtcccatttattaattcatgctgtcagtgtctgtgctactggtgctatatttaggaagtggtctcctgtgccaatgcgttcaagtctacttcccactttctcttttatcaggtttgttgtaactggattaatgttgaggtctttgacccacttggacttgagttttgtacatggggatagctatggatctatttggattcttctacatgtccacattcagttatgccagcaccatttgttgaagatgctttctttttttccattgtacaattttggcttctttgacaaaaatcaggtgttcgggagtgtatggattagtatcagggtcttcaatttgattccattgatccatgtgtctgtttttatgccaaaactgagctgtttttattactgtagctctatagtagagcttaaagtcagggatggtgatacctccagaagttcctctattgtacagcattgctttggctattctgggttttttgtttttccatatgaagctgattattgttctttcaaggtctgtgaagaattgtgttaggattttgatggggaatgcattgaatctgtagattgcttttggtaggattgccatttttactatgttgatcctatctatccaagagtatggaagatctttccattttccgatatctttaatttctttcttcaagacttaaaagttcttgtcatacaggtctttcacatgtttggttagagttaccccaagatatttcatgttatttgtggctattgtaaagggtgatgtttctctgatttctttctcagcccacttgtcgtttgtataaaggagggctactgattttttgttgttgttgttaatttgtatcctgccacattactaaaggtgtttatcagctatagagttccctggtagaatttttggggtcacttatgtagactatcatatcgtctacaaatagtgaaaggttcacttctcttccaatttgcaccccctttattcccttttgttgtcttattgatctagctataactggaaactagacaccaaaatatcaaataatccaaataaaaaatgggatacagatctaaacagaagattttcaacagaaaaaaactcaaatggctgaaagacatttaaggaattgctcaacatccttagccattagggaaaaacaaatcaaaacaactctgagataccatcttacatctataagaatggctaagataaaaaacactgatgacagcttatgctggagaggaacactcctccattgctgattggagtgcaaacttgtacagccactatgggatctaaaaaaattgggaatcaatctacctcaagtcctagaaataccactcttgggcatatacccaaaggatgcacaattataccacaaggacatttgctcaactatgttcatggcagcattatttctaatagccagaactggaagcactctagatgcccctcaactgaagaatggataaagaaagtgtggtacatttacacaatggagtatttattactcagcagttaaaaaaaaaaaaaaaaaaaaaaaaaaaaaaaacctgacattttgaaaccattttgtaaacaggcctacttttttcatccaataataaatggtatgtaatacacacagaaaaaaaaaaaaacaagttttcatttttttgttttgttttgtctgaaacagtatctcacatagaccaggttatcctctaactcactctataacaaaagcaggtcttgaactccagatcttcctgcctcaacttctcaagtgctacaactgcaggtatataccaccatgcctaactcatgtagaaaaaagtataaatgattatttgacagtttataataaggttatgccataaacatcaaaactatctgtgtcttttaaacaaaaaaaatcctttttatatctatgtaatcctttaaagtcttttcctgtgtgtgtatgtacataagaatgtgtacatgtgggtatgtgtgtatggaggtcagaggtaaatttagggtgtttaccatactttctgagacactgtctctagatgaacctggaactcatcaatctggctaaactgctggccaaccactgtctctaaggttctgcattcctctaccctggtgggtacatgctgccatgtcctgatttttacatgttgcttacatgggaaccaaactcagagcctcatccttgaaatatccccagcccaagccttttcttgagaaaaataaactatataacaagtctataatttatggcctagcattctaacatcagtttataagaaccaaccataaggaaactgctgcatgctccttttgggaaggacattacatgtaaatacaaagctttccacaaaaatgctgactacaagtgggcatatgtagatattgtctatgtacatgtactaaaagtagacacatcagctcagtaatgcagataaatagtaacagtaaaaagcaaaaccaaaacaatctcaaaataaagtatttgcaaatgagatgtaatcaagaccataattaataatttggcagcagcagagctgtttctagatataatttcttaacaaccagatggaatgacagattggctaactcacctgtgtacatagtggagctgatgaactgagtcaatggctattaccatctcagccaagtaaaaccgagccatgtcttcaggcaatctatcttcaaatttgctgagcagagtgagtaaatccccaccaacataataatccataaccaggtactgtgaacaaaaataaaatgtactcagtaagtaaatatgataaaaagtaatatacttaatgcatcctggggtcaactaggactaggctgaatacttacgaaagttatttgtatgattaattcacatttaggaatataaaataatcattaataatagtaagccttctaaattttataagcaaggaaacaaagttttaaaacttggtataaaatacaagattacaatttttgctgctttttgtcctttgccaagtaaatgatagtatcactaacttccacaatagatttttctcaaatatacataacagaagcatatccactttagacgtgtgtgtgtgtgtgtgtgtgtgtgtgtgtgtgtgtgtgtgtgtgtgtgtgtacgtacgtaacaaagaagggaagggtatatgtcagagtgttcggcaggctctctgagctagataacaagtgatattatagattttgttacattttagattgttttcaagtatttattacttatacatgtccatatgcatatgtaccacttggcatgccttgatgttacaatattttttttctgaagatttattcaatttttattctgagtacaagtgagtccctgcatatatgtctttgcacaactgtgacccattcctatggaggtcagaaaagggatctcctggaactggagttacaggcagttgtacaataccatgtgagtgctgggaacaaaagacaggtccttgaaagagcagcaggtgcttttaaccactaggccatctctccagctcaatgatactttattacaagatgaaaacatttcaaggctatccctgtgctgacattatgatttacatttggctttaaaaattctttccagcactccagaggcagaggcaggcgacctctgtgagttcaaggctagcctagtctacagagttaggtacaggatagccatggctacccagagaaaccctgtctcaggaaagacagagacagagacagacagacagacagatagacagacagacagatagacacacacacacacacacacacacacacacagagagagagagagagagagagagagagagaatgtatgtcaaaaaaataattttatatatttaaagccttgaaaattagggaaattatatttcagtcctggtctacagataacttgctgtatttaggaggcctaatatttaactagctctaccctgaagtttataacaagttaatgcaatgtaataaaattctataatattatcaggttgcaagaaatggagacagttgtagaaaagaaactttaatctcttactttacaataaagctcaatgagaactgaaacaagaaaagactttaaagtacaaggtgcaattcaaatagactcatttatttacagaaagtcatacaacacaactcattctttagtgtatgtttacagagggccacttggaatccctaaggacatgcccatgggataaagagatggcaggccctacaccaagggcttttcccttgacagggcaagctactcttattacaccagattcataaaatagctaaagataccactgaatagctaaaaagaattattatttcattttttctattgatggtcagcattcaaaataaggtttcccaagctaacttttcagaacctttatccacatactagtctatgcttccttttattacttaaactccaagcctattccctcccaaactatcaatgtacttttacttaatgtcttccatgataaagacaactgataaatgtgaaagtattcctacattttcttgcctcctaaattgagttcagagtcttcctttactttgttctcagaagtaaactggctacttgtttttttttgtttatttttggtgttgttgttgttattgtttttcccctttggtttttcaagacacgtttctctgtgtctttggaggctgttctggaactagctcttgtagatcaggctggccttgaattcgcagagatccacctgcctctgcccccccccccgcccccaatgctgggattaaaggcgtgcacctccaccaatgggcctgactgctaataaagccagattccatcatgttgggggaaaaaaaggaggaaaatccacaaaacttttaatggcagtttgtcattagagagtactggattagaggtgctggatcatgctgattacctggaattagagtctttggatctatttcaacagactgaattcaatcactaaggtcttttagagtctattacctactaactctgtatgtaatctgttgctatctctatccactaacagcatcctaattcagaccactgcctctctgtggcatttactgctacagacacaagttaaaatgggtagatttccacaacaatgaaaaatggactccagaattagaagaacaaataaattcattcaccaattctataaacaatttttcagattcctactgtgtggtaacatcatactcatccaaatgaaggtacaacaaacgagtaagaatatatacttgcagaaaatttatactctacaaagaaacacaaattaatgatcaacctcaaagcaccataaatatattggcaggaataaaattagagaattgcttcaggctcttaaaagaattcagctagacatggtgaccctggtcagtaaccctgctagtgaagtagctgaagatcacaagtcaagggcaacctgatcatcaagatcactgcaaactccaaaaactatttagagccagaagtgtagctttgtagtagagctttacctggatgaggacctgggtcctcagggtcaggagtataggaacaaaaaacgaacccaacttttcagtttggctcactgatttgtctaaaatttatttttgtcaggatgtaatgattattttctaacagatgaatgcttactatgtaaactgagttgctaaacaatctattattttctttcattcagttgagatgtacctttatcatactttaagaacccaaaatacctctgtccctggatctgctgtggttgcctatgtttgtgtcaatattgttctagcattctgaattaatttctcagtaaaattaagtgtctcgtagaacaggtttttactcatgaactacttaaaaaatatcatccaatctggttaaactttctctaaactcattcaaacaaatataaaccaagatgcaacgatcctaaaatagatgaaggaagaaaacagccttccaagtgagcagcacttcccaactgtttagaagacaaacaatccaaagaaattaggccaaggatattaacagacatttacagtcagcatcagccaagaacacatgccccactgccatactgtatccagaaatgaacaacaaagcagcagcaagataccatgtgtggctgtgctttgggagagtcagaagaaacactagcttcacatcaacaaacactacagtcctttggaaaagtcactttacagggccaaaactttaatgatggagctgaggctataactcggtcggtaaagtgcttgcctggcatgcactagggcctgtattctgtccctagctctgcacaaactgggcatgatgacacacaatccccagcactcaagagctagaagcagaaggatcagaagttcaaggtaatgttcaggctacatagcaggttaggggtcagcctaaataaataaagaagggtattatttgatctagcattatccatctgagcaacccaattacaaccaatatttcagccaggggtaataagaacatacctgtaataaacagcctgaggagaaggctaaggcaggaggatcacaaactcaaggctagctcaactaacacagtgaaaccctgtctcaaaaaccaaaaaagtccaatatttaagggagcagtaagctccaggctcagtgagaactatatttcttgctggtgctataactcagtagttataacatctacaagtcagtctctaacatccacggggtattgggttcaagcctcactaaccatcccaaatataaaatataaaataaagtcactataccacacacaagaggctgggacaaaagtattgaggatgcaagaccagcctgagttacatagtgagtttaggtctggccctggacatggaataagatcttatttcaaaataatttataaataaatgataattcaagaaattatagcttaaacatttcccttttatccctcaagcataaaatacacaggaaattaagagtaagaacacatgagaaaaatataaatttttctgattcatgatcctcaaagacataaaaaatattctatttacatcttagcatcatatattaaactgtgcatcttctgcttaagcacactaaaggcactccatataaccctacactttttcatggtatgtgcatagtagtatctaggaaagttggaaattgaaatccaaattaactaccataaatttcttgatttatataacagtaaaaatgtctggttacttaaaaaatggtcaaaagttactttgcaaaataaatatatttagtacaatttctgttttggtatctaaaactagatttgtctacattcttaaattgtttcattttctaataacctttaaagatttatttacttatttatgagtgtgcataggcactgagtgtatgtatatgaactgcaggtgtccaggtgcccgtgggggtcagagaacagcatatgtcccctggaactggagttccaggcagttgtgagctgcccaatatagttggtaggaactaaactcgggtcttttataagaacagcaagcgctcttaactgctaagctattgcttcagctccaaaacaggttttatgggtggttttctttttgttttgggtggtgcagggggatgcaatctagagccttgtgtatgctaggcacagtagttactgtagggaaaaggggccagccaaagaaacacaccctgagcagagccaaagaaacacactttggccctgcaaccaaaaccaaagaaatgcaccctgaccttgaaaccagtaccaaagaaacacactttatccttggaatcagtcagtgaaagaaatacacactggccctaaaactaagggtaaaaaaggaccaagcaagaaacacactttggccctgaaacgggagccaaatctgaccttaagcctgggcagaaaactaaccaatcctgagcagaagatctagccatcctagaccaatccccaccctggaaaactccgcctccgcctccgtcccccccccccctccgcgtcaaaatccctatgtaaacccagtgtctgttcagtttgtggctgctctggctgcctgggtgtcctctgccaccctggcagagggcagccactctcctggattcttctccccccccccaaaaaaaaaaaaacacttgaatgaggtttgggtgagaacttctttctctggagcagagatgaccctgggtggagcagagcagagcaaagcagggctgtatcactttttgccggggaaaccttccctggcaaagtaagttgttacactccactctctgggggactggagccgaacagtaaaaactttgccccaggaagccctcgcctgcaggagcagagctgatacaccagggaagcttttccctgaagcaaggctatataaactgctatgcttatgtgacctgtggtattccttggctcctgaatgccaaaacacctttctatccaagctgtaacacccagtattccgtgactcccaaatgccataattcatccctgtccatcccatctgagccgtccaaatgcttgcagttaccactcagctacacgcactcatttattttctaacatcttttaaagcttaaaagaatggctgtgatgataactaagacttcagaattctgtaaatgacaagaattttcattttgatcctcctcccatataatatatataaataatataacttctatatacagatcatatctcagagaatgccactgaagaagacatgcatatgctaaagtctaatgtaaagactgcagatcagtctgaataattcacaagacacaaagggtaataagcagcttagaccttttttctcatcttaatactttttggcaaatttttgctgttttaaatttgacctttgtggggctggagagggggctcatcaattaagagcacttaatgactgtccctaattgcagttccagaggattggattccctctcttaacctccataggcagaaggcatatggtgcacaaacatacatgcaggcaaaacattgatatacataaaataaataataattaaaattttctgtttgagcactttttatatttacttctactttataacaaaatgtagtttttaaatgatgcataaattcacggtaaaagtatacactggcaggattttagcctttattacttttgaaaattaccatgataaatactttttctaagtgtaaataaatacctagtttatgttcaatgtgctcatgaattttgctaatcagtctacatatatttctgcatggtatgtccatccctaaaattacaataatcaaactaaactatcatcccattcactctgactctgaacagtaaacacatgcaaagctttatcctatcatctttagaaacaattctgactacaaaccacagtgatgcatacgatgtactaaaatacaaaggccactgttgtttgtgtagcagtttcttcctcgatcaaaagcttccatcttggagggaagctcattaagacatagggtgttcatcaggaggtgagcagcagcagggtgttctaagggaggcaaactttccactgtgcagggaagctccttaagtcaggaagtaaacaactcaaaatagctggtctccgaaactgaccagattcactagtaccaacctctccttccaagtgtgcacaacattaccgactgcagaatgacactgctagacaggccaagctgcctccgctactctgagcagtggagctacctggaaaagcacagaccattcagaccaactgagctgccccagaggacactctccaacctgctgagcggctggcctgcacgtgtgcagtgtgctccaggcttctggctttatggactgtcagtcacctcacctcggggtggatttttggtgacagagctgcctgtgagtcatttctgttcctacagtcaaccctaacacaattcaatggctcaccaagttggactttggtggtatagtactttagtatgtcggtagttccccatctaaagggggtggaagtgtgctcacaagtctcaataattgtcataaatgttcattttcctttctatttaacttttaaattctgtttgctgcccactaaaagatataaatctggaaataaaaatggatcaaaaactgaagaactatgaatagcagcaagccaagtagtggcatattgtactggagaaaacttaaccttttttatcctttgacttgtccgtccctgtctctagtttctctattcattgttatttatactcaggtggtacagattctggtattttgagctttccctaagttcctcccaaacttcagtgaggcggcccatgatgtcatatgaacgtagctcacctaaatggagcatatggtcacactgaaaagtgaatacagcatatggtcacactgaaaagtgaatacagcatatggtcacactgaaaagtgaatacagttttaagaagcagaacattactaatgaaatctactgggagagtcataaaaagaaaaactcctgaactgtctcctatagcatttaacttaagtaaattaaaagtctggatgtagttggggatttcttatgtaaagacatagcaaattcaattttaaaaaagcatcaaatttctcagacaaaaaaattctcataccaagtatacaacttactctggaaaacatagtcttttttcttctatttaaaaaaaaatctatgtttagctgggtgttggtggcgcacacctttagtcccagcactcgggaggcagaggcaggcggatctctgtgagttcaaggcaggcagatctctgtgagttcaaggccagcctggtctacatagcgagttccaggacaaaacaatacagagaaaccctgtttcagggaaaaaaaaaaaaaaaaaaaaaaaaacctataacactttagaaaagtaatgctaatctctatccactaaagactacggttagaaaactatttcttactaagttgttgtcatcctggaaggcgtagtgcagagtcgttatccacttgttgtccccgttcaccagcacatccctctcttcacgaaagcatgctgtctgaaagggaagggaggattttaaagaacactttatacaaacctagaaaacaccatccaaacaattgctcgagaatgtgtatcacagtataaaacgtttaataatttttagaactgctttagtccaaaacaatctgaaaaattcgcagaattatttagcttacacacagaccaaccaacccattacctacatgacacaaatatccaatttctccatatccacttcaccatttttaaagacataaaaaatgagcatagcaagtgcttttgacttttgcattgtagtaagacagaacttggggtcttggacatgctagacagtctttgtactcgtgagccatatcctcagctcttacagctggtactggttatccataagaaagattaagtagccatgatacatgaaataaattattatacaactagccctagtattctctagtattctcatgtatatacacaaagcacttatttggacaaacaaaagtgccaaagccgggaattaaatagcaatatctgagaaaatactaaaacaagtaaatgtaacccattaaatagtgatttaaactgtcagtcgagttattaaaatctataacattttgctttagttcacttcaggaagaacacagaatcatgttacctactaagtccagctgtatagcttaactgacctcaaagaatggtttgcacttagtattttagaagactaaaagagcccaggaaacccctttcctggctttatcttacaatggcagtgatctgaaattttaaagacaatccagctagaatatagtagatactgctttacttgattaataattccaaactaaactctgaagactttagtcaaaacaaattttattgtaagttctaatctatcctgaattgctcagtaaaaaaatgttttaaaagataaatatatataataaactacaatatacaatttcaaacatatacagtagtagagtctaaattgtttctcacaaagtactgtcactcgattacagcaattattttattccccactcttattttatgacactctcacacaagcaccaccatccctcagctccactagtgcacactcacacacacaaactattctataaagacagtctcaggctgtgggagaccgaatatgggtcccaggttctggccaccataaacagcggtggcaccaggaaactctggcccactattgtattgttaatgtcagcagggatacttttgtttaccacggcctcaggataatatgcctccttatttgcatatctatgcacctaagcatctatataggcctgcacctgggcagggagatcagaggtaggtgagtaatgtttaggaagtgggcgagcaggtgagcagggcgagcaggtgagcagggtgagcagcgagaggagaacaatgagagaaatggttgcctcatagtaatagcaggatggttaagagacaccagaaaagatggctaataaagaaatgactctagttccacaacatggaactgagagctctctgaagatgacaagatgcctgtgtttggtctttatcaccgttgggttcctcgaaacttccaggtccacacacccccactcaggtagaaccccatggactaaggctgagacatgctgggtcacgacatcaggcattatatagtctattcataataagctattctttttaaagcacagatattagatctagatataaggcatattccagacattttgcttaatgtactttgtcctaagttgcttatggcaattgggaaagatactactggcatctaataaagagaagacaggatatttcaatcacataatgaacagatcagcttccacaagaaataagcaagtatcaacagtagccctgttaagaaaatctcctgagtgctgtgactaaaggcatgtgtcactacacctggctgattttcaaatttcaaccaagcgttttgcttgccagaatgatttaagtttcatgcacttttacattttctgtattcagtaatatgttctttaaacttcatccttaatagactactgggataatgcacaacaagaattcctacgttgaaacagagattaaataaggtccatatataaacaataattctgcaaagctgtcacatgactctttagaacaaccataaaatacatgcctcaaatcagcaatcctatacagcacatcaaagctacatacatagtgccctcaaaatggctcagcaggtaaaaagtacttaccattcaagtctgatgacccgagtctagaccctagatcctggggacggaggaggggataggggggaaggggaggacggagggggggggtcgataaactaacctcctgaaagttgttgtctgatacacacatgtatcatggcaggtatctgcctatgctcaaacatatatatcatgtacctgtatgtgcgtgtgcacaaacgtgcactcacacacatgcaatcacacaataataatgaaaatcagtcaaaatgcaaagtatactgatgattatacctagttaggcttctcatttattgggaataaaaataaagacttctctccttcacaaaatactgttatagagaaatttttcaaataatattaaaatatttaaagtctaagattttcattttgaaaaataaatggaattttaaatttagaaatatcttaaagatttccatttttttatagcaaggcatcaaattcactgtttttagttgtttggggtttttgtgacaagttctttttgtgtcccaggctagtcttgaacttgctatctaactaaggataggatagctgaacccagcagcttttacatttactttcaagtatatagtttaacatatatttgatgaacacaagaaaatgagacacaaaaaattttaagtagttagtaaaaaaatgtttttaatataactaacaaaaatcatttgatatctatatttggcaaatgtgcttaaaactacacatagttacatactctaagttaataactaaaacatttatttgagcaacagcttccaaagttcatatgtgtcccctactccaaacccaggaaggtagttacgttgtaacattcacacaacaaaatcctacctatcatataaaaattgtcgtaagatcatttcaacacctctttacaaaaactggagccctcggggccaccccgccaatatctctaattaagagcacttcatagttcttctacctttttatttttttaatgttaattgtacatgtgtgcataagtgtgtgtacatgtgtgcatataggtgcgtaggtgcctcagtgcacacctgtggaggtcagaggacaactttctctttccaccataggttccagggatcaaacttcggctaagccacctcacaggccctttacactgactgcactctgtgggtggcatggctggttctcacagtctttcttccctcattttgaaatttctcctttacaaacacataaagttaattttggtggaataattaaatggactaataatgtgagtctgcctcacttgtgttcagactatgcataagttcacaaaagtactccaacattgatgtacagaagcttttacaccagcatgttttaaagtggcctaacttagaaacctagtgccatcaagtttgcagcccagagactcactcacctcagctcttttcagcatctcccacttgttcagaattttcatggcaaatactttatctgcatttttcagtttaactacagcaacctagaaaagataaaggaaatacaacttttaaagtatggcaaaaaaaaaataacttcatccattttccattttcttctctgtaagaaaaaataaacaccaattatcaattgtttcaatgccgatcaattctaagatcctaaattaaatgtcaaattaaaatttcacattagtgaacatatgtcaaacaagcaattttatttgtgaacagtatctgctgcttattatacattataacttcctttccaagttttctgcccaggaatttcaactcatcatctcttactaagatactgaccaagatgcacaatatgaaagcagtagatgttatgagatactgcacgccagattccagcatgatgagacagagtgttctgtgggcatcagactatacgaaatgaactgaagatgctgctgctctttatcccattgtgcgcctgccttactttattctttcccctcccccactcctgtaagagcaatcatgaccaacagtttcacaaaccgtggactgtgcacaccctttccaacaagaatgcttctgccaagtacaaataagactattctcactgtcaacaaactgattacatttctgctcctaacttagtttccatttaactagataatctctttggggcccttccagcatgctgggtttgttacagggctgaaactaaagtacagaaatcttcaccaacaacatttccggtaatggagaggcaccactggagagaacaattattatctgctttagcttgaatgccaggtgcccctcaaaagtccacgtcatgatgaaggtttgatcctcagcacagcatttcggatgatagcacaagagggttaataatagtttagtgcctttaagttgctggggtctgggggactctaaactgacttgactgtttcctccctccctttcttcctatcaggtggatggttttattttgccacacactcccagaacaacatgctacttcaccacaggcccagaacagagagctaattgattacacactgaaatctctagaaccataagccaagataaattttcctttttataagcaaattatttgaggtattttgttatagtgtttggaacctaacaacactgtcctaacatgcaggccagaacatgtgtacagctctttgaacagttcaaaggagaatttccaaagataaaaagtaaatttaaattcaaactctatttttttttttttttttttttggtttttcgagacagggtttctctgtgtagctttggagcctatcctagcacttgctctggagaccaggctggtctcaaactcacagaaatccgcctgcctctgcctcccgagtgctgggattaaaggcatacgccaccaacgcccggccaagctctaattttttaaaataagttttaatagcaaatgtgcatattaagggcacttattaaatttgtatctagatgagattgtcattaaagtaatatgatgacataattaaaattactgcataaagtttctcagtagctgtcataaagttacatcatcaaataaaatggtggaggatgtgtcaggaagatagctcagtaaaaaatctagccacacaagcaagcctagcaaactgtaacccatgtaaaagcctggtgtgctggtgcacagctgtaacctcagtatccacataacaagatggaaggtgtggacaggagaatcccccagaagcttccaggccaggtagctggaagtgcacagtagagcagcagaaacaagagccctgcaacaacgaggtagaaggttaataactaactgttaaattgtcctctaatgtccacatgcccaataatatgcttccagtgtccaaatgcaggcgggcaccatgctaagatttcacacaggtctacagtccctcaaatgactcacttattagcaaggtgtgctaaaaccaggagattattagttttggttttttttttatctcttactgtaaaaacaaacatgcttagctaggcagggatgaggtaccacacctttaatcccagcacttaggaggcagaggcaggctgatcctctgtgcgtttgaggacagcctagtctgcaaagttgagttccacaacagccagggctacacagagaaaccctgtctggaaaaatcaaaatgaagtgtttcttcagaagcatgaacagacttgttgtgcagtgctactccaagccttgatagggtgatgtgtaaaaatgtgcactaaatttccttcctagattcctagaatactagatgcaaaacaacctgtaggttgtgcagctccccagaagaggttaacagtgatagtgcccagcacccattcaacaccacaaccattagctagcacttcctgggggttaggaagatggagcaatatagaatctgaaggcatgagctgctaccatgcatctgtacctctacttcaggctcccactctccccacctcctaactgccagttgttcatccgccactagtgtgacagccactatgtctgacaattcgttcgccattaaaaagagaaacagctcaacttccagctttatgtttataactttgatactatacatatacacacaaattccctcaattgaaaaaaatctacatacaaatgaaaggtaagtcataatattagcacaatatggttttcagtagtaaatcactagaagtgacttaaatattcttaaagagaaaatggacaaaataaaataaactcatgtgactggagaaatgttaagaatactgtttgatagagaaaagctgaagctcagcatatgatgtgaaacataagtttatagaatgttgtagatcataattatttatgtatacagaaaataaatcataaatttccatgccatatattaaaaggacagacaccaaaatactagaagacgaactacttctaaagttcttcagagacctaagatttttatttgcctttctacctcttctgtgtggtacacacaccttaaaagagtttcataaactgcctaaaaacttttctggaatgaagtatggtttagagaaatagcagtcagctcaagaaacattgctgagctatcaaattaatgccatgatgaaaaagattatgaagctcccaaagtgatcactgatctgttcctctgttcacactacaaatcctttccatggtcatggcagtagaaaaacaaaaggttgtctacaactcccactttagatcctgtatgctcaggtagcaaagtcagctggctcataagaggatggcatgtggggtggtttgaaacaaaatggcccccaaaaggagtggcactgctaggaggtgtggctttgttggagtgggtgtggccttgttggaagtgtgtctctgtgggagtgtgctttgaggtcttgtatatgcttaagtcacacccagtatctcagttcacttcctgctgcctacaagatgtagaactcccagctacctctccagcaccatgtctgctaacacgcagctatgccccaccatgatgataatggactgaacctttgaaaatgataagctgccacctcaattcaatgttttcctttataagagttgctgtggtcaaggtgtctcttcacagcaatagaaaccctaagacagcacgttacaacatccttccttagagtagggtatgtagctcagtaatagaacacttgcaaatagcatgaacaaggctctgggttccatgtccaacacacacacacacacacacacacacacacacacacacacacacacactcacaacacacacacacacacacacacacacacacacacacacacacacaaaatcaaaaagtacattagtatggactaaaaattacaaagaagaaagatacatttctgaaacatcaaagatgattttaataattcctagtaaacactctttggtgtcagaaaacctgtacacagtacagaaatgatcagcatgtgacaaatatactaaatggctgttgaacacaacctgtgtatcattgtgtccagctataacctctaagaataatcacactatattacataggatttcaatatccaagcagttctccatcttttgtatgatattcagaaatctaggctaccttggatatagtcaaaattcaccacagcttctcttctgccctaataaaccttgccatcacgctttacctgacctttctacctgtcctcattcacagtctattctcaacagtacaaaaacaatatgcttacatgtaggtcagatgacatcactcttttggtcaaacttctagtgattttctatctcccttaaagttaataagaaaagccaaagtccttaccattaactgtaaggtctgctaaactccctggaatctactcctcactgttagctcacttttgctcaagccataatgctccccttgcacaatctcaccttaggactttgcacttgtttttccccagacctagaaaatacttcatctccataggcccactaagtctgctttcttgctccctcactgaaatgtcactaagtcctttgagactttctattacatttcttagcttccttttctccttaagtctcataattatttaacacaatatatatacatactacacagtctaactacatacaatacttagtatttgccccacaagctcttttagagtaggaatttctacctcctctgttcactagcatatggttagtgcctgagagtcaacagatactcagtaagcacattctggagagactcatgttggtaaatatatctggaacattataagggatcaatatgctcatctgcaagtacatgactatatggatattgaaatctagaaataaggctggtggtgattcatcttttgtatgatttctggagcctgtaatctagctcacactgctcccctaccagggctctcaaagtcccacctttgaaaatagtacattattgctgtgttattattgaccattttttgttttacatatttctctcctaagtttctcctatatagcacctaccattatttttattaataaaaccaaatctacttatttcagaaaaactgtactgaaaatgtgctacctttactaagcacactacatatgctactcactcaatccctacaccaatctgaagggtattctattttccccacttaaaaaaccagtaaagtagtctgtcaatctagaacatgcctacaaccccagcacttggaaggtaggggcaagaggatagcttcaagttcaagactagcctggtctacacagagagtttcaatacagccagagctacacaccaatactgtgtctcaacaaataaacaaattggaagacagcctggtctacacagtacgctccaggccagcatgcactacagagaaagacactgtctcaaacaaacaaaaaaactgaaaaactattctgtgaatgatcaattatattattaaagaaagtttagggtcggggtgaggctttgtggtaggactggcctgacataaatgagaccctgtgtttaattcccagtactaccaaaaaatatatataaataaataataaaaaattttaaggagcaaactaaaatcttaaattactacaaactatttactaaacatccagaaatgtgctcttgataaaaatataatttatacatagagcaccaacagccaaaatatttcaaactggtacatcctgagcatcaaccaattaaacagacacagattataaaagatgacacctgtgggatctttggaccacagaccggcactatcaaaggcaaagcatgcactaaatttagtttcttctcccaggagtctcaagagagcctgaacaagagtctttaaagaaaaatgaatgcctacaatgtattctcccctttcaggccctcgtactagactatatggacacataaggaaccaggtaattagaggaagcaagctaattaaaagcttttgacacctgaagcaggggtagcaggccaaagcagcaagctttcacaacaagctctgaagcccagaagcctggaagctgccggagcaaggctggagcaggcagaagcggtgagccaccaggaagctgtggacaggtaacacccagggcgtaagttaaaggttttcctgaaagcaaaaaggaaaacccagcgttaagttaagcagtaactgacacgaatgtgttgtagagagaagatcttaactcatagagctgctaaatttcaactgtatcttgccctttattgtttcccattgtgtatatatttcttgtaagagttttaaaaaataatttattttcatggtttgtctacagaaaagaaaaaaaaacatagttggtgggtggaaaaggtattaaactgatagaaatgttcctatcagatatccatgccagaggtgagcctgtccattgagcctggtagaaacaaaatcaaaagaaataattacctgtttagggtctttgcatttttaaacttagcttgtaaaagccacagaatatatatgcccaggagagatgtttgctttaggaatgagtttattttcttctcgtgtttgaaaagtaaatttgaaaaccaaaggtaggaaatcattcctttctgtcaatatgactatgtcacttggattggggctgacaattgtcctctaacagttgtcctgaaagctcttatttcaacatcactctgttgtactattgagtgggtgagaatggttggctgaaacttcaatcccactactcgatacatattttgagatcaaaagctggaagccaagattagccttttagcgaaagtagctcaaagccttcagtttgatcctacattaagtttgatgccttttaataggagctcctgatagcattgaacctgatgtgactccagtgtgctacttaaaacccagaggcaaagaaaagtaagagagttattggaacctgacttcatataggtcacataggatgcaactacagaccagaaacccaaaggatcaaaaacatccaggatctagggcaaaggactgaaggtaatgatgaatgacaagcagactcagaactgggaaggacaggatctcagaggatgaaaacaccagtgtgaagagcaagcctgaaaactgactttggtgtttctttttaagttattatttatagactgttttgagaacataaacaccttaacttacttctcacctcaacctcatgaaaagacaaaatatatgttttgaagagataaaccataataacaacttaaaagactgaatcaggtgatgaaatatggtattttaaagaattctgtgactccaggatgagcagaatagcattaggcagagaggcaagaacgggaaaagcacagcccatattacaaacatcaggactttcatgaaagtaagagtaatgcctaaagtcttaaagctaaagaactcataaattcaagacaacaaagatctcagtgtgaagactccaagttttatctctttggggtagaaggataactatatactaaagtatataataatgacttgaaaacaccacacagtgaggtggtggcaaatgcctctgttctagcactttgtgtgttttcagggaagggaatcaggagttcaaggccatctttgactacatttaagttggaggttaacctgggctacatgaattctgtctcaacaaataagtaagtattagtagcaatgccacccacttcggggccctgtgatgtcatgaagcctaacccagaaccccagttagagacacccaaaaccagacccctctttacctgttgctcacctaccagacattctacttaacatgtagccaggcaagaatctaaaccctgaagctcacagtggtccattcaactggtccacaacttgacagactggaacagcaaagacctgaacacccacccaacagacacatgaccagaaagtcacaccaaagaaactccacaaatgtcctaactccagatgcacagattccaccataaacatgaacaactaagacactatccttcctccagaaactggaatgcagactcatattccttagctgaagcacaagacaaggattccaaactaacaattctgaatatgttcaaggactttaaaaagcatatgaactgataccttaatgaagaccatgaaaacccagtacaataaactaacagaacagttaaccaaagaatcttaaagaatataacaaaatgataggaattaataaacactgttcactaactcttaatactaatggtcttggttctccaaaatgcacacactaacagactggattaggaaacaggatcatctttctgctgtcctccaagaagcacacctcgcctcagcatcaagaacagacaccaccttagagggggggaaaaaagatactcaagcaaacagaaccaagttgaaacaagcaggcatagctatttcagtgtctaacaaaatagacttcaacccaaaattaatcagaggagataggaaaaaacattatattctcgttaaaggaaaactccaccaagaggctattacaattctaaatatttgtacaccaaaacaaggacacccaaattcataaagaagcattattacatctaaaatcacatattgaccctacagtgacaaggagtaacttcaatacttcactttcaccgtagaaaggtcatccagacgaaaaataaagtctggagttaagaaaggtaagtaacaaaaatctagacactgtttagaagaaaaaataaattttcttctaaacagcctgtagaaccttttccaaaaactgaacacattaggatacaaggcaagtctcaacaaatataggaaaatttaaatagcatcttgcatcctatctgactaccacagaataaagctgaatatcgacaacagaaacagcagcaagtacacaaaataactaaaactaaacaactcactaaggaatgaaaactgagtcaatgtggaaagcaaaagggaaattaaaaacctttagaactgaatgaaaatgaaaacacaacatttatgaaaaacaatgaaagcagttctaagaagaaagctcatagtactaaatgcctatataaaagatgatgaaaatatatttgtaacttaataaaacagttgaaagctttagaaaaacaagatgaaacaatgctcaaaaaaataggagacaggaaataatcaaactcagagctaaaattggtgaaagagaaatggggaatactaaaaatcaatgaaaccaattactggaaaagaaaatcaacaagcttgacaaacctttagccaaattaacaaaaagagaggatctaaattaatacaattagagatggaaaggttgagattataacagacactgaggaaattcagagaaccataagaaatactttaaaaaaatctatatcctcccaaactggaaaacttaaaataaataaataaataaatggacttttaatacatattcaaacccaaccaaagttaaatcatcaagatgaaataaaaatttaaacaggcccataacccttagtgaaataaatgcagtaactaagagtctcccaaattaggccaagcagtggtggcacacaccttttatcccagcacttggaggcagaggcagttggatctctgtgagctcaagaccagactagtctacaagtgctagttccaggacaggctccaaagctacacagggaaaccctgctccagaaaaaaaaaaaaaaaaaaaaaaaaaaaaaaaaaactcttctaaaaattaaaataaaaaaataataataatacaggattggatgactaccaacaatagaaatggaagaaacatttccaaattcctttatgaaatcactactagccagataccaaaactacacaaagaaacaacaaaaagaaaaatatgggccaatttccctaatgaacataagtgtaaaaagtctcaataaaatacttgcaaactgattccaaaaatacatcaaaaaggtcatccactatgatcaagcaggcttcatcccagagaaacatatgcaaatcagtaaatgtaatccatcatataaacagattgaaagacaaaacccatatgaccatctcattaaatgcagaaaggcccttgaccaaatcaacatcccttcatgatagaagtcctggagagactagacataaaaaggcatacctcaacataataaaggtaattgacggcaagcctacagccaacatcattatacatgtagagaaactcaaagtatttccactaacgccaggaacaagacaaggttgtctactctcttcatacctgttcaatatagtacttcaagttttagctagagcaataagacaactgaaggagatcaaggggatacaaacaggaaaggaagaagccaaagtatctttatttgcagatgatgtgactgtacatataagtgaccctaaaaattccaccaggaaactcctacagctcataaacacttccagcaaagtagcaggatacaaaattaatacacagaaatcagtagccttcttatatacaaatgacaaatggaccaagagagaaatcaggaaaacaatactttcacaatagccttaaataatataaaatatcttggagtagctctaaccaagtgaaaaacttatataataaaaactttcaaaaactgaagatgtaagaagatggaaagatctcccatgcttatagatcagtaggattaataaagtaaaaaatggccatcctgccaaaagcaatctacagattcaataaatttccattaaaattccaacacaattcttcacagaacttggaaggccaattttcagctccatgtgggaacatgtgcgcgcgcgcgcacacacacacacacacacacacacacacacacacacacacacccacccaccccagggcagctaaaacaattctggataatatagaactgctagaggtatcaccagcccccatctcaaattgtattacagatctatagtgataaaacagcagggtactgaaacaaaacagacacattgatcagtggaattacattgaaaaccaagacatgccaggcagtggtggtgcatgcctttaatcccagaactcaggaggcagtgagttcaagaccagcctggtctacaagagttagttccaggacagcctctaaagccacagaggaaccttttctaaaaaaaaaaaaaaaaaaaaaaaaaaaaaaaaacccacaagacataaatccacagttatagacagctaatttttgataaagaagccagaaatacacactggcaaaaaggcagcatctttaacaaacagtgctggtcaaattggatggatggatggatggatggatggatggatggatggatggatggatggatggatggataagaacacaagtagacccacaccatatcaccttgtacaaaactcaactccaaatggatcaaagacctcaacataaaaccaggtatactgagtttgatagaagagtctgatagaagggaaggtggggaatagtcttgatctctctcacacacacacgcacgcacacacagacagacaaacagagagagagagagagagagagagagagagagagagagagagagagagagagagaattagacacaattacaaagtgcacaatgaatgaaacccatatcaagaaatacaatcctgcaacataccagaaacagcccaaaagtacttgcatgtgcactataaccctgaattgctcctatgtgtgctacaactcgagacagtctcatccttgactctggcaataatgtagtcccttctgtgttgcttccttcacccagcatattgtcagattgtagaacaaggctggttacactagcctcacaaagtgggctgggcactgggtccctccactataacccatagaagttacgatgattaagagaacctgcagataaactgacatcaaatggcaaggttttttttatataatgttcctcttctatcttctgtagttgcctatataagttaattattcctgcatatatatttattagtgaagtacctcttgtatttgtagtatgattcattactatcttaaatatataaaaatatcacatctggaatgatacagctgttccgtggaaattgcctaacatgaacaagaccctgagctcaatgcccagcataataggcgaagtgtgctaaagattgtaaactgtgtaattaattttaattcttccttttgaacttgcacactcagagtcggaacagtccaataaaagtacagatattagcagaaagtatttaaaaatgcaaaacctaactacatacatctacaaaagattcactttaaatacaactgtaaaaggcagggttcaaaccatagaaagctgactaacaggggactcaaggtacaaggcatgaaatactacctgacaacagagaagcaatccacaatgatgagcatcaggaagacataactaccttgaatgtgcatgtgtctgctataagagttttcaaagtcaggaactacataaaactataggggagaaataaacacacccttagtcactggcagaaccaaataaccatcagtaaattacggaatatcttaataacagcattgattatttcaatcacattgacattagtaaaacacaacaagaaataaatgtggaataaatattatttctaagggaatgtgatgtgttcattaagaacagttcacattttgaccataaacaaattatgaaattagtgaaaaatctagagtatatgacctcactgtatataattcaagcagccaaattttaaaagcaaagaataacctccacaactcctgaacagaagtttaaatagtattttgaaatcaatgataataaaaaataatctttagagcccaagcagtgggggcacacacctttaatcccagcacttgagaggtagaggcaggcggatctctatgagttcaaggccagcctggtctacagagtgagttccaagacagccaggactacacagagaaaccccgtcttgaaaaggataaagataatgataatctttgggatgaacctaatcaccattaagagcaaaatatatgcttccgtgtttaaactgaaatggaaaagaagcaaagatctgggtttctctcttgagacagaagaagacaaatgagtaaatctaaagaaaagggcaagtcctgctcggacctctgaatacatgtgcagacatgcacacttgcaccttcacatgtaatacgtacacaacatgcatgtgaatgcatgtgtatacacagaaaaacaactcatacagataaaagtacctctgatatttaattgcattggaaaacctctagtaagactcaagaaaaaggcatacactgtgaacatgaaagagaggaacgcacctcagactctacagacagcaaaatgaataaaaggatattatgaacaacctcattacaacaaacttgatagcttaaatgttagcagacacattccatgaaaaataaattatgctaaagctgatgtcaactgaaacataaaaagctaactagctaactccacaaccattaagtgtcaatcaattatgactagtaaaaacctgcccatatagttgcatcatcaaatatttaaggaaaaaaagcagtgctgtacaaaagcttccaaaccataggggggggggggaaaaacacctccgcaactccttactttaattcatcacaaccctaatatcaatgtgtgaaaatgataaaaacaaaaaattatggggtaactttctccttgaatacatatgtaaaactagctaataaaaaattaactgaagagaaaaacatcttgaaagacaatccatacctaatagacccttaccacaaattgctttaatagctaaaaaatcaattatgcaccattgccaatagaattaatccatgaatgtaattaacaagaatttcattaaaataagaaacttgttttgtaatacaaaaggtaatgttgaaatttgcacagcaagcatgtatacgcacgcgtgcgcacacacacacacaacaaaaatctatgctgcaagtatcacaatactttacttcatattatgttacagtgctgtcttagtcggggtttctattgcttcaatgaaacaccatgaccaaaagcaacttggaaaggaaaggatttatttggcttacacttccacattgtagtccatcactgaaaagaaaccaaggtaggaacttgatcagggtagaaacctggaggcaggaactgatgcagaggccatggaggagtgctgcttactgacttgctgttcatggcttgctaccctattttctttccttttttgtattaaaattaaaagcaatcttattttacatgccaatcccagttgcctctccctcccatcctcccattccccccaccatcccaccccctatccacgcctcagacaggctgaggcctcccatgggggatcatcaaagtctgtcacatcatttggggcaagacctaggccctcccccctgtatctaggttgaaagagtatccctctacagggaatgggcttcaaaaggcccattcatgcaccagggataaatactggctccactaccagaagcaccatagagttatcaagccccccaaataactcccacattcagggggcctggtgtggttttatgcaggttccccagctgtcagactggggtctgtgagctcccacttgctcaggtcagctgcttctgtgggtttctccaacatggtcttgacccctttgctcatcactcctcactctctacaactggactccaggagttctgctcagtgcttagctgtaggtgtctgctttgctcccatcagctactgaatgaaggctctaggatggaatataagttagtcatcaaattcattatagggaaaggcatttaaggtagcctctccactattgcttagattcttagttggggccatccttgtggattactggcggtttccctagtgccagatttctcattaagcccataagggctccctctatcaaggtaactctgtgctctctttctctattcttgccccaaactggaccttcctgatccctcatattctactcccactccccttctctcctcctctttctccttcctccctctcccctccccccatgctcccaatttgttcaggagctcttgtcccttcccccttcttggggtgggggggtgtccatgtatgtctcttagggtcctccttgtttcctagcttctctggagttgtgaattgtaggctggttgtcctttactctatgtctaatatccacttatgagtgagtacataccatatttgtctttctgtatctgggttacctcactcatcctgttttcttatagaacccaggaccaccagtccagagatggtacttcccacaatgggctgagccctcacccttcaatcactaattaagaaaattccctagagctggaccttatggaggcattttctcaattgagtttcccttcccccctttcagatgactctagcttgtgtcaagatgacatgaaactaaccaggtcaagggccatacttaactgatagattaaaaagaggaaccagcaccaaacccttgcagctatagccatctgatattctgcggatatagcaaagtttactttggagaaaaaggcagtctcttcaacaaatggtgctaggaatactggatattcacatgtaaacaaaacaagactgggtttttaactctgtttctccataagcatccattaaaatgggtcaaagtctgaaggaaaacaagcaaaatacttcaaaatattgacaaagccaagggtattgtgacaagactcttaacagctcatgaaataatataagtaatgacaaatgggactgaatcaagttaagaagattctgcccagcaaaagaaacattgcacacaaatgtaagagacatcctacagaatgaggggaagtatgtactagctattaatctgatgtgattaatatccagattataaaaagaactcatagagctaaatatatatacatatacaaaaacaccaaataattcaattaataagtgaataaaaatcaaaatagatcataataagtaaataaaatgtaaaatccgtacaattatttcagtagatgcactgattaatgattaaaattttaaaccttcagaaactaatattagaacaattctttaattagacagtgtacatctaccaaaacagctacaattagcatcatatttaaagtgaacaataaatcattaaagtcttaaaatccttaaatctaaatccttttaaaacaaactcctccctaaatttcagtggagggtaagtgtatccacctggtgacacaagcccaacaccacattagccatctaagtagatactgcaagtcaagataaagaaatggaaggtacaatctgtaaaggtaaaaaaaaagaaactgtccttctcaaacaaatgaccaaaacatgacatcaggaaatacaaggaggaaataaaaatcaattgtacctatatatcagaaacataatgcttgatataaaaagtgtatagtcatttgccatcaaatcaaaaaagcatcaacacttggaataaatttaacaaactatgcataatacctacaatctaaaacttaaataaatcagaccttaaaaagcaagagggctgaggaaactggctcaatgggtaaagttctaaccatgcaagtatgagggtcagagttcaaatccctaggacccatgtaaagctgagcttggtagcaatctgtgagttcagtgctcctatagccagatgggaggtgaaaaagaacccctagtagctcagaatcagctagctaagtatagagcctcaaacaacaaagagacctggtctcaaacatagtggaaggcaatattcaacacctgaggtgcaacacccgaattcaagacacactgttacaccagtgctccaccatatgcacacagatttttccaaagagaaactccttgtctgtgaactagatttaatagtattagatgtcagctttcccaaactatctactcaatgactcagctccaaactagttggcctggtggaaactgaacacactagttctaagacacaaagccccagaatcactaacacagcccgcactctcacactattcattgcctgctctacactttttagtgcaaagccacgggaatcaatgtattgtgcggctggcacaagcaagatcatgtgaaaaagagaacaggcagcacacaacacacatgcagttacaaagccaggtgattttttttctttatcaaagtgctagcaagagtaattcaataaaagcaaagtatgtgtaaacaatacttcagaaaacataaaataatcaataccaattgaataacaaacacagacttaaaagtttttaaagactacagaagtaatttcttttgggggtgaggggagtttgagacagggtcccatgtagcccaggctagcctcaaactcactagatagccaagattggtgcttaactcctgcctcagccaagtgccaggattataagtgtgcatcatcatgcccggcactttctaggaagaatttctaagaagatgacagcaggtggaatgatggattagaagtttcaaacacttgctgcttttgcagaggacctgggttcagttcccagccaccacatggaggctcacaaccttcagtaactccagttccagagatctaacaccttctcatggcctgttcaggcaccaggcaacacagtgcacatacatacatgcagacaaaccactcatacaattaaatgaaatgtctttttttaaggaaaatattcatcatctttgggttaggaaaaagttcttaaacacaaaaatcactaatcattacagtttaattattgaattttatttcaatacaagatctaccaggaaaggaaaacccaaaccactttctatacatatataaccataaaatcatgtaaatccagaatatactaataacattcaactcttatctccctaatccaaaaatgtttacttgtccgaaggatattcacattatataaaagaacacaaaaagttattgagctttaataagacttaacaaaaaatgcaaaatggggtcacaatgaacaccactacatacctaccaaaagtggcttaagttaggaaaatgagactagtgttacagagagtatgactcaggacttagaaaattatttggcactgtctattaaagctaactatgcctaccccaggacacaggaattccatccctaggtttatataaaacataaatgaatgcttatacctcaccaaaggatgtaaataagaatatttctgacagcgatattctgaacagccaaaaactgtaagtaactctagcaaccaacaacactattatgactaaaacaaacataaggcctagtcataggaagaaatactgtgagcaagcaagtggaaaactaggatgcagagccagcatgacagctcagtgggaaaggcactcgctgccaagcctgatgatctgagttcaatttccagaaacacacttgatggaaacagagaaatcattcgcacagctgccctccagacctctagatgcatgccatggtacacacacacatacacacacatgtacatacatgcacagagagaaagcagagacatgagaaaataaagagatcataaatgtcaaaggacagacaaaaagtttacaagggtgtgatacataagcacaatattgagtatagaagctagaaacaagaatatatagtaaataactctattaatatagaattaaaattcaggtcacataaatctatagtaagagaggggaaggctagcaaggaattcggattccacttagtagagaatatactataaggctacaggaaagaaactaaaagaattcagatggatagttaatgtaaatgctaccaacagttaaaatatttctactaatatcagactaatatatgtcaaagagcatcacagagataacaagaacattctataatgacacaagagttcatcattaagaagacaaatgattgtatttgttatcagcaaaaacttaaagaaataataaaagaaaaattgtctcaggaagaaataggtcaaggaaaaaaaagaaagtgtcaagaaaaaatgaaataaataaataagccaacccctttcttaggaaatggcagctcaagagaaaacaatcaaaaagaaaattgtaaatagctaaattaatgaatttgacctaataaattccaatcacacaagatatgctatctcagctctgatcacattataactcaatggtgtaaatataaccagaaaatccttgaggttcttacatgaacttcgaaactcatggatacaaaccaaaacacactgaaaatgtaaaaccacactgctaactggagcaaacaataatggtagcaagacagcactgcttggaggagaatgcacactctgaaagaactagaaaccaatattctaaactatccacttcagtacattagaagaatggacagcaagttaatgccaaggaaaataaaacattaaaaagtgggagttaatctacaacaacaaaactgaagaggctaaaagttaattcatcaaaaaaaaaaaagaaaagaaaaaagaaaactgacaactccctaccaagacaaatttaaaagtgagatcaaccattcatttgactatatgaatcaataacggatcaatatagtactaagttctaaaaattatgtaaggcgaataaactgacacataatttttaaaactctattgtaaaaattaaacatattgactctctcagtaatgaattccaggctgggaaggcttcacctgtggaacctgagaagcatataaggaaagttgcagttacttcaggagcctgcagaaaaaactgagagagggaacactcctcccatgagaccagcagaaccaagaccccaaaagctgatggaggtactaaaagaaaattacaggccagtttctgcccaaaaaaacttagatacacacatttttaaaagcatgccaaatgtactgacgcataaaaaagggtaataaacaaccaagctggaatcattttatacatacagttaatttaacatttgaaattaataaatgaagttcaacacattatccaaataaaagagaaaactgactagtatctcaacagatacagacgaagcattttattaaaattcatgacatttcccgattttaaaagtaaaattaatacaatgactagccatgaggttaataaataaaattcagctaattgcaatcatttgaattttcaacaattagaaaacttaagccattttaattaaaatagcctcaggaataccatacatctagcaaacctgctaaaagatgtggactcctctatgctgactgaaactacaatcttataaagccctacataaaaggagacacatatcttgtgcatggtttagctgactcaatcttaaattttcaattaattataaactcatctccagttttaatggtatcctaacccaaatttcagatctctgtagcttgctctcttgcccctcccccagacccggctctgtgtatgcatgcgcatgcgcgcgcgcgcgcgcgcgcgcgcgagagagagagagagagagagagagagggagggagagagagagagagagtgtgtgtgtgtgtgtgtgtgtgtgtgtgtgtgtgtgtgtgtgtgtgtgtgtgtgtgtgtgtgtgtgtgtgtgtaaaaactagattctaaagtactatgaaaacacaagaagagaaaagagcaggatcaggaggaagaaactctaacagatttcttaggagatgaagtagcattagatagtgtggccttggcacgagaaggaaagaaactagaaacaaaattcagtacacattaaaagaagaagcatcacagaaaacaatgtttgcattccatgcaaaatgtttcattcacaactttaatctattttctgatcagccatatcaattataactgcaagtaaatatcgctcaccattgttttataaaacaattagcaaacattctataaaaatcatctcttacctccccaaaagctcctcgaccaatcacctttaatatttcaaagtcttctctgtgtaatcgcatttgcttcactttagaagtaaatggtttagctgaaacaaaagaatatcagttactttaatgaaccgtgatacaaatatatgaatatttcttaaacagtaaaaattcaaagtataataaaaaactaaaccaaagaacctttaaaaatcttaccaaactatagaagcataaattaactagtataaaaaggcattatcatttttgtcatttattcatttttttttttttattgagacagggtcttaggcatgtagcccctactggccttcaactcactgtgtagcccaggcaaatctgtaattctcctgcctctacctttagaagtgctagggtgacaggtgtgtgtgtgtgtgtgttttgcatgtttgcatatgcaggtgcgtatgagtgtgcaaggacatgtatgtacatgtacagatgaaaagacaactttgaataagtgaacagtaaactgaacttctgagacactaatatatacacagcctatttatgttaatactatatgcttccacaaaatctgtacacttgtcagattctcatttctcatatgtaattctacagcactactttgccttatgctttagggaacatacttctgtgtagaaatacacgatcctttatttcttcttaagacacccatccttttacctttgccaaaacattttaacaaccatgtgctcatcagaatcaaatttcagttactctgccttaaaacataatttacttcaatactgccagtttgtcaaggactttaaaagttgctaaagatattaatatggctgggcggtggtggttcaagcctttagtcccagcactcagaagtcagaggcaggtggatctctgtgagttcgaggccagcctggtctacaagagctagtgccaggacagcccccaaagccacagagaaaccctgtctcaaaaagaaaaaaagatactaatatgaaaagaaaaaataaaaagcaaaaattttcagtgtggatgactgaaaattactaattttaaaaaatcattgtatacactacaaaaatgggggaaataaaaattaacaggattctcttattgtttactaactaaatatacctaatttggcaacaatattactgagcggcacagtaatgtttaactgctggaactgttccttgactctgaactccttgttctcttttttcatagtcttaacagggcatgctactacttaggtagccttaagaacttgaaccccctccttttttttttttttttttttttttagataaacctttcttttgactttaaaggttctttcaatgcacagctgaaatttttctgctttgatttaatttagaagttttccttctgtgtttataaacaaatttttgtctataattctctttcctctgtactgtgtgcatctagtttggcaccaatgaggagcccagctcactaagcctgcaagttttcattcctttgctgttcactgcacatcatcattccagtttgtttaaaaatgtgtgaaaaatacatcaataaaaccttaaaagacaatacatcggaccatgacttcaggttctagcaaaacatctagcatgtgtgtcttttcagtggacttttgataactgattcatttcatgttgtcaaatgactgtgtttcatgttttctaattctacaaatgacaaccatgtaattagtatgtaatttttatgaattatgtattacatgaaaatttaaaaaattatgaatcaggttactaatatcattcttttgttttcaaaactctaccatatagacaatgtgtataatccttacttaatggccagtaccggtttttggttttggtttttggtttttcaagacatggtttctctgtgtagctttgtagaccaggctaacctcgaactcacagagattcacctgcctctgcctcccgagtgctgggattaaggcgtgcacaactaccgcccagctcagtactggttttgttttttgtttgttttccagtacttgtttttaacgatctatttttactgttttttgttatcattattgaaagtctgcaaatacactaccattcttccaattacatgtttacttgatcctttctagttttctgtgaatctattctgtagaattctaaactggatttacacagaatgccagcaaagagagcagaggctaactgacattaacctcctcacctccagggataaaataagtcattttcaaatttagatatagacattagagcaaaaacaaaagtccaactaatcataatgagatgataaacatgtatgtaaccagtaatataatctcaaaatacaaaagtcaaaatgtagaataatcacacctttctggaaagacattttatttcaaatctctctgtgtaactgatacctcaaacagacccccaaaaagacaatatatttgaataacatacatatatagcactgtaatagctggaaaatattatctttatacacattcaattctatagattttgatgatatcaagctgtaaaaccactgccaataaaactcaaatatcaaaaacatgaaaaccaaatcatatgtatgtcatgcaattgaccacaaatcaataaaagacaaccagaaatgcaaaaaacctctgaaattaaaaggaagaaataattagaaacacaaaaaaagtattccatgtcaaaatttgggggatatagattagacaagtacttacaaaaaaggaaataaaatttcagcccagtctgacacagtctgctttaaagaaacgctgcaagtagttcaggagcacagaagcatcctgaagagagggtaagagagaccctgtgtgcacccaacccatcccacatcaatagaattcaacacataaagacaaagcaaagtgaattaaatcgcttaatttgaaaataagcacataaaagaaaagcttggggctggagaggttgctcagtgtctaagaacccatactgctcttccatacgacccaaatttggtccagcacccacactaggcagctcacaactgcctaactccagagatatctaatgcctctgtcctcaaagggcatcagcactctaatgtacatacccacaaacagatatgcacacagcatccacaaagtagtttttttttaattttaaaggacttaaaaagattttttataaaaactgctttttctttttttttttttttttttttttttttggtttttcaagacagggtttctctgtgtagctttggagcctatcctgaaactcactctgtagacgagactggccttgaactcacagagatccacctgaatcagggtgttagtcttccacaaagacaccaccaattgttaacagctttacaagttccaataaaaaaaaaaaatggcatgccatgacacactctgaaggcacagaagaaaccactggcacacaggtatctcccaggagcaaagagaatatacagcatccaaatgaagctttctatttgtcattcttctggaagacccatggtcctggaaaaagagccgtaaccaacgccacccagaagtaagtagtgactccaagtgggagcagtaggtagcaatgcagcatcacagtggaccctgcaactgcccaaggaaagtcatcagacgccagttagcagcaaacaactggacaaacttgaatgagggaccaagactacagaataaatgacttgtggcatgacaagtttcaaaatggagcaataacatgaaagatgaagcctgttgttcctcactgacaaggcaactaaatgcagagaataattatggactggattctgaatcaaaacatttaaaatggaggttaatgtacagtattagtgggacaatagttaaatttcaattttggatgaacagtaaataaaattattataccagaacagataaaatggctcagagggcaagggcactcttcaccaagcttgacctgaattcaatccccagaaaccatgtggtaaaagaaggtaacagactccagcaattgtcctctgacaccacacaagccactaaaggacataaatggagcacacacgtgtgtaaatctaattttaaaaatttttaaatattacaaagttatatgttaagttgataattatactacaaagcaatgcaagacagtatctttattctaaggaactagatgaagaactatgtgaagttacagagtcgtggtatcaataatttaccctttgaaggttcggcaaaataaggtattcatgtttgtgtatagaaagaacaaataatggcacaaatatgacacaatgtccaaaaacaaagcaaaacagatcaatctagaaaagtatatggaagttcattaagctgttcttgaaacttctaacacctcaattttcctttttaaaaagtctacagttgttttacctgccaaacatacatactgcttgcattttgtgggacactcattcaaagggatattattcatacatacaaaagacatgaagtatcaagccacagaaagatatggatgattcttcaatgcatactgttgagtctaagactgaattcgacaacacatcctaatcatgactcttcagtagattcagattttcaaaatataaagttttaaaaccaagattcaacttctataaaaagtaaagaaagtattaaatcaaaattacatgtgagaaataaaaatccaaaacatcaaatgataccaaaactcagacttcaaggctcatgcacttgcagaatttcagtcaatgaagaaaagtttccccaagatcaagtgacctggaaaacatggaaacatggaaaaaatgcctggctttggtcacttgtatccagcacaagactacaagtgaaagcctgagcaagtagataaaaataaagaaaacataaagaaataatgaaagctatctaaacaggataggagaaaatgtttgcaggtggcatgaaaacactaaagattatgggaaatgcaaagtaaataaaggaatcccacaaagctacaggatataaagtcaatacaatacacaaaagtcagctgcattttatactttatatttcatactttataggaaacctataaacaaaaagtagattagttgttgcttagggctagtgtcctttatatgacagctaatggatatagaattttcttgggatgtgacaaaaaaaaaaaaaaaggcctaaaattgagctgcggtgataataacacaaccatgagtgaactaaacacattaaattgtatactttgcatcagttaattgtcagatgtaagtaagaatcagtttgtaacagcaggctaatggtacaggcctacacagctacacagagggctaaggatcacaagtctaaggcctgcctaggctatagactgagatcaagccagcctggacaacttaaactttgactcaagaagtaagaggaggaatggagattttctatttatttgcaataaataattagaaaatatttaagttacatttggaatgaaataaaccagtcagaattggtgttgtatcttttaatcccagcatttggtaggcagaagtgggctgatcactctgagtttgaagccagctttgactatataagagagtttcaactcaaacaaatttacatagagagaccctgttcttaaacaaacaaaaacaataaagtaattaggaataagtttaacaagggaggtgaaacacttgtatactgaaaagtataaaatgttgctttaaaaaaatgaaatgcagtctaagtgaatgtaaagacattccatattctggattgaaaagatataatactgctaaaatgccatgacacccaagcaactgagtcaggactatacccacaacattataatggcacttctgataaaaacagaaaaacctaccctaaagttcatatgaaatttcaatgtagaataaatagccaaaacaatctgtaaataagagatgtctcacatcattttaaaacccactacaaaactacaatagccaaaacagtatgctactagtataaagacatatggttcaacagaataaatcaaccacctgagaaacacacattctcctaagtgttcaactgattttaaattgagtgcaaggataatccaaagagaaaacaaaagtcaatataactgggcatacatatgtatgtatgtaaatattttaaaataatgtgaagaatgactgaagatacttgacaccaacctgacctccatatgcacctgcacacatgcatgcacgagcatgaacacacacacgaaatgaacttgtgtccttactttataacatacacaaaactaacgtgaaataagtcaaaggcctaaaataaaatgacatggagttgggtaggtgaggaggatctgagaggagataggagagaggaaagtatgatcagaatatattgtatggaaaaaattttaaagctaaaactaaaagttgtagaataaaacatgggaaatctgtatgacatcaaatatggcaatgatttcttatatgtgaaacaaatataccgcaaaaaatgattaagggtcacagtcaatctctaaagaaaaaaaagggggatataatacagaaatgaatacactgttatgtattttggtttattgatacagatttaaggtcaattttgttgtaatatatatttctactcttgtttaagattatgtttatggagctcattttaacgtaatatatagtaaaatacaaattaatagtcatcaaaatttaagcttttattgtaagacgctattaagacattgtcaagagaggtggaaatagtaaaaacattgcaagacatatatcaaataaaggattaatactaaaacatataaaaacacagtaacaaaaatataggattcaaaatcagttagaataacatttctccaaacaaggtatgtaaatagcaaacaaacccatgaaaagatgtccaccaccactagccaaaagagaaatgcagacctaaccacaatgagttaccacttcagactatagggttttattaaataattaaataaaattaaatcaaaataacaaatgtttataagagtgtgggaaaatcagacatttacagattgctggaggtgctgctttgaaaaacagatggctcctcaaaaactaaaaatagattcaccatatgacccaacaattgcacttctagatatctaaaagaactgaaagaagatacttgcttagcaaggctcactacattattattcacaacagccaaaaggtgaaaacaatgcaagctatcaaaaatgaatgcattaggaaaaggtacgattaacacataatacatacggtgcaattatcattcagcctcaaaatgaaataaaagtctgatatatgctaccatatagctggatcttaaaaacattctaagtaaaataagtcagatatcagatattatgtgacttaacttctattaaatacctaaaatgggaaaattcagagagactgaaaatagagtttatcaccaggagttaaagaggaggaggaacagggaactgatgtcaaatgattataggatttcactttggtataatgatgcatttttttgaaataacggttatacaatgtcatgaatataatgcctctgaaatgtacatttaaaatggttacaatggaaccaggcacagcagtgcacacctgcaattccagcacttatgaagtagatacaagaggaccaggaactcaaggtcatcctcagccacacagcaaggtcaatgcctgctggtgatacatgactctgtctcaaaaacaccaccaatcacaaaaaggaaaaaatgccaaattgatattatatacattttacaattcttaagatatcaaaaccattgaattataaatttcagatagatgagctattaatccataaatcaaacatcaatacacctttaaaataaaactataaacaagtttgataaggtaaactggcatatacaagatttattaaactgaaaacaaaagctaacccaaaacaatttcagtatccagcacctacacataaaataagcttaacctcaactatatcacaggatcacaaaactagtgtacagtagttcacaatctgttttgtcctgaggctgaattagaagtctaaaacaaagaatgtttgtgagaaggaacaaagtgcagtaactaatatatgtctatatatgggtatacaattttcttgctataatatgctacttttagcaatataaagaaaatgaaccaaaactaggctgagagttatcaaattactgaacactctatcacaatgtctaggaaaattaaaagactatgttattatagttcagagtttagaaactcagtagtagagccctaagactgacaagtcaactacttaaacgtttcctctttctccaatgcatttaaaagaagcagatacattcttcagttgaggggcatctaggctgcttccagtttctggctactacatataatgcttcgatgaacatcgctgaacagatgtccttgttgtaagaatgtccttcttttatgtatatgcctaagagtggaattgctggatcttgtggccgactgattcccattttcctgaggaatagccatacagaattccaaagtggctgtaagggttggcattcccaccagcagtggaggagtgttcccctttctccacatcctctccagcataaactgtcattggtgtttttgattttagccattctgacaggagtaatagggtatctcagagttgttttgatttgcatttccatgatggctaaggatgttgaacactttcttatatgtctttcagccattttagattcctctattgagaattgtctatttagttctgtaccccactttttaattggattgtttggtgttttggagactagcttcttgagttctttgtaaattttggagatcagccctctgtcagatgtggggttggtgaatatcttttcccaatccatgggttgtcgttttgtcttattgactgtgtcctttgccttacggaagcttctctgtttcaggaggtcccatttattaattattgatctcagtgtctgtgctactggtgttatgttcaggaagcagtctcctgtaccaattcattcaagggtatttcctactttctcttctaataagttcagtgtggctgagtttatgttgaggtctttgatccatttagacttaagttttgtgcatgtcaacaggcatggatctatctgcagtcttctacatgccagcatccagttatgccagcaccatttgttgaagatgctttctttattccattgtatagctttagcttctttgtcaaaaatcaggtgttcataggtgtgccggttaatatcagggttttcaacttgattccattggtctacctgtctatttttgtgccaataccaagctgttttcaggactatagctccataatagagcttgaaatcagggatggtgatgcctccggaagttcttttattgtacagggttattttggctatcctgggtcttttgtttttccatataaagttgagaattgttttttcaaggtctgtgaagaattgtgctgagattttgatggggattgcattgaatctgtagattgcttttggcaagattgccatttttacagatgatacatttaatttgcttctaaaggtcaccagcaatatttaacaaaaaatgctttatacaaatacatgtttacctttaaaactatgagaatatttactaaaatcccaccaggaactctactgatgagaataaccagatattagtgacaacttgcaaaaacaccttaaatcattatttaaaaaaaaaaaaaactggaaaagatttaataatcactacaccatccaaaggattcactgggtctgttctactgctagataaactgtttttctgactaaatgttatatgtaataacatttggcaaagtccttactacatcagttaatgatggcagtaccttgacctctttggtgcagttcagtaaggcaccttcacttgtggcaaatactttctgaaagctttgccatgctctctcccctgaaaatttcctctcagttcttaaggatgtatcagatgtacacagtgaggccctactttacatgccaaagttatgtgaaccagtgtgaaaaaattaccctaagctggagaacaaataagttaaaactgaactgtttctgcagatgactccaagaattaataagtttagtgggtactggaacaaacattctaccacgagactgaaaattaaaaacaactgatcaaagtgaagcaaagtaaatgcagaaagttagaatggagagctacgggacactctgacagcccctgctccgggggtaatcggggcatctttcgaatgcagaccagatgaaggcactgggtcccctcaaactcctcaaactggagttacaggcagttgtgagacaacatgtggatgttgaaaactgaacctaagtccttggggaaagtagccagtgctcttgtcactaagccatctctccaggccctcattctttctctctcttatcctttctagtattttaccttatggctgctgctgttaattcagtggagtactaaaaaattaaaggtaatggaaaaacagaaagagaatactccatactaaggcagatgaagagaaataaagaatgatgaaaaatgagtaattaccaaagccatattaatagtgtcaccagctagatgtggtgacacaggcttctggtaccattcctagagatgctaacacataacagcacatcctaggaggaaaaaaaaaaaaaacctttaaaataaaactacatacaagtttgataaggtaaactgacatatacaagacttattaaactgaaaacaaactatatatttttattctataataaaggattctgaaatgtatcacaaccatattacctgggtttgatttccagcatacaaataatggctcacaatcatttgtataaagaataaagttacaagtttctgagatatttggcaatgatagttaaactatttcattcatctttcaaagtgtatactaaaaaattgtttgataacgagtcactgaacaaagcttcaaaatagtccatatgtacttataactgaataaagcttcaaaatagtccatatatacataaggttttgtcaacagagtaagcagagataacaaagagcagcacacatacaacagtgcaacacagaaacgctgagtcagcaggaagagcacaagccatacaagggtaagaactgagttcagatccccgaaacccacagaaagctgtgcatggtagcacacatttgtaactcaagtgttcctacagaaagatggagcagagacaggagacgccccaggagttcaccagcaagctagcctggtgtgtgcagcagctaacaaaaacacaccctgctcaaacaagatggcgagtaaagaccaaaccctgaggtggtcacccgacctccacatctgcaatgtgccaacattcccaattatatcatacactcaagaaatgttaaattaaatggacacccatgaaaaattagatacacaatgaagctcataaaagagaagagagaggagtctcaataaggaggctaatctaaggtgtcaacctgttactgacgctcattagtaaagcatacttctagtgcatctgtgagagtgtttcctgaaagactagcaggtgaatcacctaagtgaggatgactagccctgattaggggaaggcaccatgcaattctctggacacgcagaaaaaaagaaaagtaggagaagggtaatcataccatgcttgtgaaatctcatgcttgtgtaatctcaatctctctctctctctctctctctctctctctctctctctctctctctctctctctctctctctctcccccctccctcccagaatagacttttttctgctgctgccatcaccatcattgtaggacatcatttcaggttacttgatctttgtatctgagatttagaccaacctccccttccatcctgaactagaggactcttgggcctctagccttgactcaagactatatcatcatcatacttcattctctgaagtttagaaacgataccattctgatatggctgcaggcagccatatcagaatttttccagcctctacagtatgtaattatttgaaccaattgaacaaatccagacactgacacagatcaggcaggcaggcaggtatgcgcgagcgcgcgcacacacacacacacacacacacacacacacacacacacacacacacacacacacacacacctaccttgtgagccaatctaataatacgtaccatttatttctctatcaactttgactaatacaaccaagaaccagagataagtctaatcgaaactttaaagaagtagatcccatatgcagatgctataaaagcataaaggacagagcagatggctcagaagtgaagagcactggctgttcttccagaggacccaaatttgactcccagcacccatatatatggcagctcacaaccccgtataactccagttcctaggtaataccctcttctggcctccattggccccaggcacacacacaatatacagacacatatgcaggaaaacacatgtacacttaaaatagaaataatattttaaaaaaaatttaggggggctagggagatggctcagtggttaagagcactggttgttcatccatgggactagggttcaattctcagcacccacacaatggctcataactatctgtagttccagttccaagggattggatgccttcttctggcccctgaaggcaccaggcacacatgtggtgcacagacatacatgcagataaaacacataaacatactaagatttaaaaaaaaaatctttttaaatttaaagcataaaggactattggtcctggcacaaaccctaaaatctagaagcacaaagaaatgagggaatgctggtgacccacaagggagataactggaatcagtgacctccattaaagaaagacctatgacactttcttcagataatgaagtaataaaatcctgctcctcaatgcctaggacacagcctggggtgccacaagagatgaacaaatgtgtgggtctgcagggtaaggtacaacaccttggcaattctgtcagtgggaaggctggggtaggaagatcatgagttcaaggccagcctgggatatataacaacactctgtatcaaacataaaaccaacctgataatccaaggaaaagtcctgtgggcaccaagacttccaacaactctggggataaggaaatgcctaagctgaggctacacctcagtgacagagtgctcacttaggatgggtaagggtctcaccacaatcaaagatagataataatagaaacaaagaaaaattaattctcatgaattcagggctcttgtttaccacaggtctgtttgctactttaaagcctggtacttcgcaagtcatatgccagccacaccaatcactctcctcttgtctaatactcagtcaggcataagtgtaaaacttgttttctgtcccttgaaccaatgacataaaagggcctgagagctcctggaaggggccccttccctgaggagtgaaaacagggactaatcctttcccagactccctgttctgtccacttatgatgctatataatgatgtgctctttctttcatgagccagctgtcttgtgacaagtgacagaactaacaaggggcttccagcactctgcttggctgagccagtgaccgaccctggggccacctgcctcaggacttcttgcttagtaatgaaagtcctgtttaaagccactcagtcagttggactctttagtacttacagccaaccacatccagttacaaatactaaaaacaaactcaaaatgtaattccctctctcctgtgacagacaacatacaaaagctctggcaactttaccattaatcaaaaaagtgtctccatgtttccaaagagaaactatacatgtttgagcatttttctaatttctccttacttagaatacaactaatcattttcagactcactccttatctaacaaactcagtattttataatcatttctttcctatttagatttttaaaacttcaaaagcataatcactgtacctctacttctaaaggacagaaatataagcacactaaactacaagacaatgtttaaaactcagaataagtaactcttaaacaagacaactaaataatgcttctaacggtgaccaggacctaaaaggacgaccactgaacggtgaaagaatcaggtaatttctgcaagggaaaaagtaaatagcgcctcagtgagaagggaattctacttttactactgaaaacacataaatcccaagtttttagaacagttttagccactaagatgcagtttaaggggcaggaatgctggtgcaaaggaaggggggaaagagaaaaaagggggagaaagggaaggagaggtagaaacagaaggaggtgagtggaagcaacttcttaaaaatcttacagaaaggtgattggaactagataaactttgactttaatgcagttgttacaggtacctcctaagccagctgataaccgcataacatggggaggtggatgaggaacccagtaaggaggaaagggagacgtccccagtggccggtattgctacaaaattctttcatttctacactttgcaagaactgaaatccagcagtggacactccacccatgttatcccagtcagattctgttttcccaattaaaagaaacagagtaggagttacaggacagattctctgaagaagcctaagagaaagcaactgaccgtatacccacaacatgcatgtgcaagtttcaactgacaggcacctagagggaaaaaaatgccaaataagtagagaagaaaactggatctggaaaatatatcaaattaatccaaaagatagttaacaatatgcaaaacagtaaatacagaaaatgtatttagccaggtggtggtggtgcacaccttcaatcccagcactcgggaggcagaggcaggtggatctctgtgagttcaagaccagcctggtctacaagtgtgagttccaggacaggctccaaagtcacagagaaaccctgtctcaaccccatcccccaaaaaagtatttaaatgataaaatgcaggtccacataaatttgtactttttgtaaatataaatagcttgcatgcaccagctaaaatataaagatttcattctgaatacatgctgtttccaaaagacattcatatttaaaagtacagaaaaagacatgaaaatgaaaggttttttttttttaaaaaaaaaaagtacataataaccaaataaagatacattacttagattgaaataaagataaaagagtaagtttatggcaaaaagccctactacacatgataaaattcaccaggaaaaatagtaattctacactttatggatctaatgaatctttcctcaaaatgtctgatggaaaaacttagaagaattacatagaaaattggaaaatcttccattgaggtataattttaatacacatgcctcagtaattgatgacaaaacaaaaatttgagcaatctaagcaacatgctagatctagaagacacgatatattgaaaaccataggggatatataaatattacacatacaatattgttgatacaaggtagaaaatttcaaactaatgagttttgaaaagtgtaaattaaaacactcacaagccaaaagagaaaacagaaataggaaattagaaaacacttaaaatggaacaagttagaaagtttttttaaaaatcacctgtgagatgcagctaagatggtatttagaaagccagagtcatgctggagaggaggctcagcggctgagagcggtggccgcccttccagaggtctcagtttaccacccagcaccacatggcagctctctatctaccttcagagaggcagcacctcagtgcacataaaaatgtgcaaaccaaccattagaaaccccaaggcttttaatttaacatcaaaagtgaaaattgctggggctgaagaggtgacctggctgctctcacggaagacctgggctccattcccagcagctgtacagtgactcactatcttaactccagtctaggagggcctccacaggcaccacctgcatgcagtacatgcacgcacacatgcaccacacatataaatgaaggcaaaatcccatacaaataaaaaatttaatgaaaaatgctaaacaaccatcaactaatcacaaaataaaggaattaaagtaaatgaaataaataagagatgagtgtacatattaatagaaaacaagtacttaagaaaaatcaacataaaaatagttttcaatactggcaaacctttaataagaaaatggaaaagattaaataattttttttttacttaatttatgtatgagtgtttggcctgcatgtttgtcccagccccatctttatgcctggtacttgctgagaggttagaagaggatgttggataccctgtaactggagttacagatggttgcaaaacacaggtgggtgctgggaatccaacccaggccctccacaagagctgccagtacatttaattactgtgtcttctctccagcaccaatattagaaattttaaaaatacacaattactagtaaggtactaaatacaaaatcatttgcaaacaaataaaaataaatgtttaaatatgaatgggcaacttcttaggaaaatccaacttgtcaaataaccaagaagtaaaagaaaactaactagaataaccttctatcaaataaagagatagatttgaatctaatttacaattatcccaaaaagaaaattcagactgagataggtttggcactgaattctctcaaacttcccaatatgtgtttgttttgtttttcagacagggtcttactatgtagccctgactgtcctggaactcattatgtagaccaagctggtctcaaactcacagagttcagcctgctttgccttccaagtgctgggattaaagtcatataccactatgcctggcttcccagtatttttgagaaaatataccaacattatttggagagatgtgtcctcctttgtttctttggttttccaaagctaatggcaaaagtaagataattctgtagaaacacatctttgagtctttactcaaataaatatattaccatatatagtcaggatctcaagaagtaccagagtttccagggagacagatgctagggcttggccagtagcttgtaaactagcaaaataaaacagacagcacctcctttttggtttatcttccctagggagttagtattttcaaatagccccttctgtttcacaccccaaatcacagaagcaacagggctctcagaagtatctgcccgagggctcctgtgacagcccagagactccatgcttatccaccttgatgccctgcactgagccagagatttgactccaaggcaaggtaacacttatagtccagacttcagatgaatgcaaggtatgctttattttataaagtgggagatgggcaattgtcaaatggaagcagaaaaagaaaatccaactgatttcagagtgttctcaagcagatgagtttttaaaaaggaagtagaagatttatggaaactgtgtacccacatgtgccctcagaagtcttcacatgccatagggagaaattcttcactgtgaagacactacactagattatctcctgttttaagatgaaattatcagtttatattttaactaaattttgactgactcagatccaaatcaatggtaataccttaaaaatggactccagaagattttcctagtaggggcgtttgctgcatatatgtatgctccatctctgccaataccatggcctggatgcggctggagaacaccgagtgtatatgaaaatgtaggccataccaaacaaactatggaagtcagtctcatgttctctcaagccttttaaaagctacaatattcttttaaaaaaaaattttaaaggtcattttaatcattaaaattcttttttcctggttggttattctggttttacccagaatcagatgaaggtgagtagattccatgtcctaaccttcagccttcctttctgttcacagaaattcaagagaaaccccaaagttcctcaaaaaaaacactactcaagtacatcattaagctgaattcccacaacctataagacacaggctatatcaaccagtcaaacaatattagccttgacccaacgccacaattccaagaaaaggtccttctcttggacctgacaatccagaagaaacaagactctcagaagtagctgtccaagggcacctccacgcttacctatcttgcttagggcgggttcctggcctgcactgaaccaaaacaggtgaatcctgaagggcctgaacacctggcaatgattaagattccacgtgtgtgggtcaatttgcacacatacacacactataccgacataaaatttttgcaaatacttctgttaagacactgaatgaagacaaacctgaagcaagcagaggagaagtagcataagcaatgcccagactcggtaccctaacttctcttctagccctaggaatgctttaaaaacaaaaactgggcagtccatgcttctttttagaagggaatgacgaaggctggagtagttccattcctagcacctacctctgtaactgcagttctaaaggatcaacacctcttcttgcctccgcaggaaaagcacacaggtggttcacaggtatgcatgcaggtaaaacaagaacacatgcaaaattaagatgaaaatggggggaaggatgggagagactacttggcaacaagaacactaaggaaaacgacttctgaaccagagcagaattcaagacaggatcctgaaagcaggaactgaagcagagactatggaggtttacggtttactgcttgctctccaaggcttaatcagctcgtttttctttactacctaggaccacctgcctaggggtagcaccgcccacagtgggctatggccctcccacatcaatcattaatcaagaaatgctccccagccttgcctacaagccaatttgatggaggtgtattctcaactggtgttacctcctcccatatgactctagctatatcaagttgacaaaaaataaaaagaacctaacaaacacattcacataaaatttattttgcacaagaaatatttattaaactgattttaaacagcctcctaaccacatcatctatagttattgttaataagagatatgttggagtttgtgctacagatatgagatgaccctagtatgacatacattaaaaagacaattaacaaagggattgacatgtgaaacagacttgtttctaatttgaactaataaataatttcttggaaaaaaagacaattaataatccaagagtcatactgctggcaaaagaagtgctataagcaagttttataagttgacaaaaaatggcaagactgtgaaaggtaacatttcaatgagcacatgcaatttttaaattaaaatttaattacaggtatttttaatgcattccattctctcttccacacaggagcactggcccagaatccctaaatcaaaagtattagaaaaggcatctcttataagtgaccaggaaaaggcaaaaagtaatttcaaactttatataacactaataatctctaatgaaaatgcctcaataaatgttaagccacaaagcccaactgtagtggagactgcttgtgacctaatcagaacccagattcccttctaattaagattctaatttgtgtgtgtgctacccatgtgtttattcaagtctgtgtgcatgcatggagaggccacacgtctacatcaggagtattcttcagtgactctccacctttttttttttttcatttttgttttttactttgggttttaataattacatcatctctcccttccctttctttcctccactcccacttttttttttttttttttttttttttttttttttttttttgacagagcttctcactaaactggaactcaccaatttggctagagtaactggccaacaaactctaagggtctgtctgtgttctagttactttctgttgctatgataaaacactgaccaaacctacataaggaagaaaggatttatttcaccttacagctcagtcccgatcagagcccatatttgaaggcagaggatggagagatgctgcttacaggctagctttgattcacagttactgttcttttgtctcccaaggccacctgacagagatagcactgctcacggtggctgtgccttcctacaccaatcattaatcataaaaatgacccacatatttgcttgcaggacaactgactggaggcattttttcaaattgaggttccctcttcacagatgacctattctgtgtcaagctgacaaaaacacctaaccagaacaacctgtctgcaccccaccctgcctgacccccttatttctaattctggctatttgagaccagagcaggtttttttctgggtattagagaggcactgtctttccttctgcacctaagtttggagtacgctgctccaatgccatcctatagcctttgggaggtggtaaagaattctacactgcagtagattctcagaacctgaatatttgcagagccatcaaaccaaaaggctcaattcatctttgttcttgatacgtcagtaaaaagtaaatcttttcttacttttaaaaccaatttgcattggattttcagttacttataacccaaaacaccatttacatcatctttactgctctgttggagttcatttactgggtgttcaattccataaacagctgagcattacatatgtgccttgtgtaactttagaagtagctatgtaaatgtttaaaaacatatataaaggatttaacctacatagcttgttcccagaataaactacactcctaaattagataaaaactacttacaactgccatctataagaacagaacaaccactaaaaaagacggaacactcttctgctcaaaaaatatcctcatgaatgtttgtctaccaagacagggtttctctgtgtagctctggttgtcctggaactcactctgtagagcaagctagcctagaactcacagagatcgatctacctgcctctgcttccctgagtgttgttggggttaaaggcgtgagccactactgccaagcctgctcatgaattgcaatgcaaatgtattcacactgtccagttttgacaacttagttgcaaaacttagaaataactcaaaatgaaaagagtttaaaaataagatcaatgaggaaggattaaagaattgttcttttttgattctataaaagctaaaactatgtcttaactttccacttttacccaatattcggaaacacagtcatcacttaggacttaaggcaagtatcaggccctaacaaaccctcctcccaatgtaattgtagtataattttggttagataaaattgaatgcctagtaattccattacaagtaaccatgtaaattactgttactttttccttcctacacattttttcttaatagctctttttcaatatgcttcactttctaagcaactgtaaattcttccccagctgttacagcatttaatgcctgcactgctctatgcccagtataatctcagcaaagcttggcttactgtgcatgagcaggctgtcttggttcctgtgtctcagcccggcccacacctcaacttccagagcattttgaaaacattaacttctactactcaacatctattaacttctgctaattaaaaccgggtaggtcccagctttaccactgctaacttagaattcaatgttctcacatctccaaagtccgtgtcactcgtgtttccagcttcacaaatgaaactgcttcaagtctcttttcctgctcttcttattttggaacatctatgactatttaaaaaatccttattatagttttagtagggctgcagagaaaatgaaattctatttatatatttaattcatcaatactaggctccaaagtttattctggatacagtacaaataaggttaaacacagacttaatgaaagaaaacaatgattgacaaattagactatttgcagtttaccctatttcttattctttctcattacctcagtctactaagtaattatttatagactgtcaactgctatgaaagaaatcatgaaccatcattttaaaaatcactttctaatctttacttgcccattaaaattaagtggttttttttttgagaaaaaaaatcactttttaaataaaacagggcaaatcaaagaggtaacaagttcctgacatgagtttcaagcagtgtttcaagattggacacatggcttctagccttgggtgtaacacgtatgatagcattaccaaattccaggcacatgccatgcattcgctatgataggcaaggggtaagaaaagaacattaaccaatatgtaaaaacctacagactagccagacactccctaattactaaccgtgttcctttatagctaaacaatagctggatgtatacaaaagggcagcacaggagagcagggaacggacacaaacccatacctcagtcgtatcagttgccccactactctgtagttgttgaaggtcaaaggattgttacatcaattcataaggatttctcttaagttttttgagtgagtggggtaagctgggcatggtagcacacacctgtaactcctgggagagaaagagaacttgagctcaaaaccaatttaggatttttagtaaaattctagctctcagaaaaagacatataaataaaattacacacatgtaagtatatgtatatatttgagcactgcttgatgacaggcatctacaagagtggtcccacacaactgtaccgtctggtgacatcaatgcatcttaggcttgtgtacatatactccatgatgttcataccacaaaatcactcaataaaacctttctcagaccatgttccattctaaagaggcatgtattaggcaaatagccaatccctctttctgaacaattcacacctaaggccagtcggcacaacagaacaaagtggaggaaaaagaagtcacagcagatcacagtcgtgctaacagctgagctcctgctactagcactgggaatgacagagcctgtagaacacaaagaacatccaagggtgaaggaaagcctgggatgaaaggagaagcttggtgtggtggtcaggcagaacaaggcgaggagcatggctttaggcacgaagaacaggagcaatccagcagagtgaacagattatctagatgacgggggggggggggggggggggagtggagtagtgatgagtgatgacttaaacactcacagaaaggtctcatgcttaaataaaaggcgctgaagagatggctcaacacctaaagcacctactgctctagcagaggacctcaggtcagtttcaagcacctacatcaagtacctcacaaatgctcctcatgccagctcctagggaatctgatgcctctaaccttctagagagtgtatcccatctccccctctcaaaaaataatatatgaaagataataagatccacgtttctccctggctgctagaaaggagatttacaatatagaaaaacaatacaaagccaggcaatgggaggcagcactccggaggcagaagcaggcggatctctgtaagttcaaggccagcctggttgacaaagatacacagagaaatcctgtctcaaaaagccaaaaaataataataaggaaaaaaaagagacaaacaagacaaaagaaactacaatgaaccctgtagtgttagactggaattggtacaaattgatgagctttcctatataaagacataaaagtatctaccaaagtaaatatttaaaatacaggaatagatatatacatgaaatgggtagatgactagatagtgcaacagatctgcatagaccaatggaagacagcactgtccactaaaagagcagcaatgagacacagagagaccttatcctgtaccctacagagtaactaccttaaaagcttgctggttccaaggcagggtaaaggaaggaacaggacaagcctaagccatcttgcttaaaccagaaagcaaaatactgctcatgaagtcatggcgacatgtcaaagaacacacaagccaaattgaaggagctcctgttgactaaatctgggtcaagacaatagggaagctactgacagctttcagaataacatttaaacaactgaatatggtatatacaactcatatatggcccttgactacttacctaatcacattttcacttagttttttttttatttgaaatagtctcaaagatagaaaaactgtaggtacagtataatgtgttccttcctaaagcacttgagggtaaatcatctactaatttgtagtgaagggttctaatctaatgattaacacagaaaaccataagctacactagatataagtacatttaataaggcaaagacagacacataatttaaaatacctcttcaatgttataacagaaaaagaagtaatctgttttgtcatgattttttttttttttgacagggactcactatgttactctggcagcctcaaactatttatgtagcccggcagacccttcactcatgaccctcctgcctcagcctctttagtgctaggattgcagacacgtgccaccacactcacccatagaataactacagtggagaaacccggccagtgccagcatgacaagtaataaggcaggctggaatctgtgcctcatttgatgggatgcaaacagaagaacactgcatcatttctgtgatactaaactttgtctgtatctaactgggagggaaatccaaataaagggttactgcaaatggcctgcaatcttcaaaagagccaaagttgtgaaactcaaggcaaacctaaagacctggctcaaccaacaccgaaaaatgtaatattcacatctgacacaggatcccagactgaatccttttgctgtaacaaaattattacagcaactgataaaactcaaataaagtttctagatcagatgacagtacctcatcaatgttaatttcttgagtttaacagttgtattatacttatataaaagtatgtagatatatatacaaacaccttgggaaggaatggacatcagtagacaaactgttctcatggttcaggataaaagagtatactatacttctgtaatttttctgtacaattgtagctattaaattttttaaaaatgttttgaagttaaatatataaggtcatagacaggaagtacataaaagttgtgactaggtaggtatacatgcccataattcaagcactcaggaggcaaaaggagcacaagtcagggccaatctgaccaacaaagggagaccatgtctcaaaaagaaaagaaaaggaaaagtacgtaccatgctaagtagtttaaatgaaactatcttgaaaagctgtccaaagtcacagatatcaagcataatgttaacatgattttaaaaatcatgtataaatttgtgtgtattttattaaattctggggcacataagaacatattttcaaagtatatacatataatgtgttaaacgctacttgacatttgataggaaatcaaagagcaaacagtaagaccaaaaaaatgtacaaatccatatttacaagtttcatacaaataaatgttgccaggtgcacaaaaactagaatagactaaagctaggcttaactcatgagatgctgcacttaaccaatactacctcacagtaaggaaggcaaaacaaacagtatgatgatcacatcaatcacaatctcaagtgactaatgaagcaacagacttctggaagacgctgttagcttagcatctgtcagaaatggtgacacattacaaaggcatgcagttttttttaaagtcagaaaaagaaattacagtaatcttgtgttctaaccataaacactaagtaaatataggtatacatcataggaagttttttgaaaccatattaatatgtcagctttgccttatacctgagctcttagtctacttttaaatgtttctttatggtaatttatggtcaggacaaaaccacagggagttcatgatgcaatttcaaaatgaggctttagtcacaccaaacaagattttttttctaagtagtgttgactgcttttcaccatatatgggttaacttggcgtattagccaccttagtaagtactgacacttaaggacaagattcttgctataactggacaattatactacttttacaaagttctcataaacaccaattagctttcttctacttcacagtttctctgtataagggaatagaaaatgatcctgaaagaaaaggaaggaaggaaggaaggaaggaaggaaggaaggaaggaaggaaggaaggcaggcaggcaggagggagggagggagggagggggagggagggagggagagaaggaaggaaggaaggaaggaaggaaggaaggaaggaaggaaggaaggaaggaaggaagaaaaccactaagttagaagaatcatctctgcaaaccagaagctgcacatatgaactccccaacacaggtgagatcttcctgcccagggctgaatcccaccccaacttaaattcagtttctagaagacataaatgagccaaactctcacctgtgtttgtgctctgagtacactgtgacaatatttttttaatgtgcgtttacataaccttaaagactctggacattgcctgtagtttcctgagggcgccacaatgtcccaagttcagtcagtgttcctctcacagttccacagttaaaatgactttgaactgtgcacaacaaagttatggtttctgttcagaactttctgaagctatttctatgataatgtgttttgtaaaaaggcacgcctttaatccctgcactcaggaggctgaggctgccagatctcagtgagttaagtccagcctggtctacagagagttccaggataggctccaaagctacagagaaaccctgtctcgaaaaaccaagaaataataataataataactttttttaaaaaggcatgtatcaaagcatattctccagtcttacacatccaattaacccataatttgtggaatattcagtatttctcttgaaatacagtttaagaaatacttgtggaaagtgttcattttcttcatacttactgaaagaccacatgaatctgtgggtgctgtgtaattttagtccataaaaggtactattcgaacaacacatcaataaaaattttaatcttctgacttgaggtttagaactctaccaataatttgcagattgaagccatataaatacaaaaataaaatgtgactagccactgcataatagctgttactagtggtggaaacactgtatcagcttaatatttcccccccccccagtttctcaggtaaaaataacaaaacatctaatgcaaaatatcctaaaagaatgcctaagactgtttgcatagccaggcaaagaaagacaccatcaataaatataatttcagaggatctgaagccttcttctggcctctgtggggaccagctatgtacatggtgcacagacatgcatacaggcaaaacatccatgcccatacaattagataaaatttaaaagtaacaacaataatttaataagattatcaaggagatggaaatacttgttgatactaaagtgaatttatttatatcctttaattagtatcactatacacttaaactgaacttaatctccaaagtggcatttcagttgttcctttattttaaggctaaatagaatagaaatttaaaaatcataatggaagctgggtctataactcagtgggtagaatgcttgcctagcatacacaaggccctaggtttaattcccagcaccatataaagcagacatggtagtgcacacctctagtcctagcatttaggaagtagaggcaagacaaacagaaactcaaggtcatatgaagttcaaggactccattagaccctgaatcaaaacagaaaaaagtcaaagtgggactgaaatcaataaaataactctaaatcatgagaaaaacttttaaactggctttcatcttctggtaaatattgtaataatatccatttctttagagctgataatacagattcaagtgattaagcaacttgcctagatcacctaggcaataattaagtgattcagtctaaatccaaagctcttcaattgtttttaaacaaccaagttgagttgtcctgcagtattatctgccatgctaaaactcagaacaaaattttatggtaatcacaaagttctaactgttcacacactgccaagataattccagttatacatgggtttctccttaataaaaggagagattgtctggtttctttataatgcatataaacaaatagatgctgacacatgaaacgcaaacaccattatccataataataaaagttcccacacatttgagatgacagaaaccaactgcttagctaaaacagttaccctgaggggggtgggggacaatggattattaaattgcaagagttcaaggcatttccttcctaaacatcataatgaacaaaatcttttcagacacaaagcagttttgttatatgttaaaattattgcaactgaagatataaaaaatagtgagaatttcagtatttaatgtagtgtaaatgcctttacatggggaggaagttcacatcagaacaagaatgtcacagaaacatccatcatcctaggagttgacagtacaggttcaccagtacagtgtccaatcatgctttgagcagtgtgtttcttagcggaaattcaacagtatcactactactccaccatggttaagtttatctctcaggtcacatggctttcatacacacacacacacacacacacacacacacacacacacacacacacacacgatacaagtctacaggcagtaagtaacatacagcttcctcaaagctagattctctttccaaaccacaagtttctcacaatttctttctaacaccaataaggagttacaaaggaacaacacttccctaagaatatgcattagaatacttgttgccatttaccctacagattttcaaatcttcaaaatgattttattatctggtaaactttgtaaattcaacgacacctgcaatattttacttaaattgtggtaattttccaaacttacaagcctctgtgtacatatggggggggagacaccttgtaacagtggttttataaaacacactttgaaactagagaagaaaactagatgaagaagcctgattccacaataggagcaaaaagttcacagaggaagatgtgaaagacaaacagtggtgttgagaacggggagccaggtccctgtgcttcctgttctgacgaaagccagtgcagctatataccagtggcaagtccaagaccacgagatgagaggctgaccaactgaaggctagccatcctcaccaacagcctgatgaaaactgtccagcaaagtgtgagcagctagggtcaagagcagccctgaaactctgagcagcatcaatggggaagaacagatctctacgtctggaagggggttttctatgcagtgacaacaaaggacactccttcttaagtgaggaataggtgatattaagagcacaggtcattcacaacaaaagaacttcttaagttaggcagactcccccccccaaaaaaaaaaaaaaaacagctgagcaattcacagtcttcaatacttaaacacagaattattttcatggctagtctatgagcaacaagaatggggaaaccagcaaattttcacaagtccacctgggataggaagaaacagccaatacactactagcatttatccctcaagttcaaaagctaatacacctctgacaatcaatgaaagccaatcactggcacaaaagaaaaataaaagaggcaatgaccattttataaaaatcaaaggattgaggttaattcttatgtctagtatattcttctgaatcaaaaatacccaatcattcagtcagactgaagtagcaaagcaggaacacaatgtagtcgctctgactccctctcattcaggccattcactctcaccctctccctggctcaagtgccccgttgccccccccccacttcccacatcttgtccctgtgcgcattcccgtcattaaattatctacttgttgtcctgaatctattacatgtactttctgaaactaggaatcatgcctctaatatttccattattagctgacatgtgtcttcaacactccacattccaaactcctttgatctcaatctataagatgtaagagtaagaaacacaaggaagcacaaatgctttgcataacaatatttcctctttctgtgtatgatgaacttgactgttttctattctagcctaacctttaaatgttggttagactttatatattgatttttgaaatatcaaaaaaaaacaggatgaaaaagaacaagctttatatacaatttcttggcagcaagtctaccaaacaagaaaaaaattgagtagcacaacaaaactgtcaagttcggctctttgaccctagaacagactaggcttactatggaatagtaatcaagtcctaagatttatgggacagttcatcaaattttcacacttcaagatatgccttaagtttccatatgaagtacttctaaaattcttaaaatagtaatattgatataatgttctcactcacaaagcaatattattttaaacagtttattcaccaagtaaccaatactgcaagatacttcagtaaccaatattatttggcaactaccttaagaagaaagtgtcaggaaggagggagagaaaggaggaatggggagaaatagtacaacagctacctaccacttaattatgttcctagtatgtcccttgggtgtcagcactgtttcagataaaccatacccattcttaaaacagaatattggatgattagtgtaaaggaagcaagtgtcctacctatattttcaatccatttacaatgatcccaaatgaagacttattttaaacgtattaaatgaatatcctaattctgtgtgataaataattctcagggaaagttaacggtgaggaacagcagacatgtagtactctagaaataattcagttccttccaatcaagccatcaccattccaattcacataagaaaaaaatgagaataaactttaaaacaactctaacaaaaggaaatgcttataccacaatacctgttgatgtatcctagtaaaaagtttaataatcagactattctctggatgtagcataaaatctgaataagctataaaaatagttatctagtgaaaacttacacgaagtgttacaaaatcaggatcagaaagcataaaaaagtaatccacatacagagaaacttgccagttccttttgtactgagcaatcttatcttatacctactttttaaataaattagtagttccttaatatttaaatttcccaattcaaagcagagggaaaccaattaaatgaatagtgaatgtattaatcattactgacaagttagtttataatgccacaactactttacttcttatagctccactataacttaaagagttctattactgacatcaaaactattactatataaacaaacacagaaaccataatctttctaataactttttaaaaacaaaatcaaagaaagtcttttaactcttactggctataagcagaaatcattctaacaacttagaaatcaaaggaaaagaacgcttttcaagtattgctgactgtaactagaaaataatataatatgaaactcagaagtgacctatggtcttaaggtgcttttatccccttgggctagcactcactgactcaatcccttctttctctctcctgctttacttttctccctcaggtcatcagcaccaaaaccaagaaatgctataaaagaaaaacagcacaccagacttggaataatcagccttcttactgtggtactgttataacaaaatgttaactgtaccactacagaaatgaaatggaccgtaacaaggaatcaaatgaaattgatgaaagtgacacatgtattgactacatatttaaaagtaacaagtcatctccttataaaaatatggcaatcatctccttataaaaatatggagtgcctaggtagtatttagcatgtaataccgaatatttaactatactattctatttcaattactgggtctttttttttttttttttttccaagacaaggtttctctgtgtagctttggagcctgtcctggcactcgctctggagaccaggctggcctcgaactcacagagctccgcctgcctctgcctcccaagtgctgagattaaaggcgtgcgacaccaacatcggcaattactgggtcttttaaagacttaaaagacaatactttttgaattgttaaaatcaaaccaaagatgacatcttgaagcaaatctaaactgttaaatttaaccttaataatattcttgtaaatttccatccctaaaagttagtaattcattaaaaatgtaaactgaagacaactcacaatctgaaaacataatctagataatctagatattcttatacattgttttgcaacgggaatgtagtgatagactaataaatgaacaaggaatgattcactacaatactttaatgaaaagatactaccattcttaatctaaaatccccaatagcttaaagatagtaaacgaaaccacttctgatgcatctcttacaacacttccactctttaattcttacggagggaagaacatgccagagactttagagcctaaagtatataaaataattgcttaaaaaattctactctcttccccagggaagagcacaccaattggttatccaaaactaaaggttcagccctgaaaatatatatacaagtaacattctgcagactaagcatgttgtatttatgaatttaggaatacatgaatttgaaagagaacaagaagtatgaaggaaagggttggagggaggaaaaaagaggggaatgatgtaattataatctaaaagcataaaagaagtaattttaagaactttttatactactgtcttgaagttgaagagatagttcagtagcttagagggcaaatgttcttccagaggacctgagtttcattctcagcacccgtgtcaggcagcttacaaccaccagcagtcagcttcaaggggattagatgtctggggtctccttgagagcttgaacttacatgtagcacatacctacatacagacccacacacatacacatacataacttaaaataataaaataaccctttcttagccaggcgttggtggtgcacacctttaatcccagcactcggaaggcagaggcaggtctctgtgagctctcgagaccagcctggtctacaagagcgagtgccaggataggctccaaagctacagagaaaccctgtctcgaaaaaccaaaataaataaataaattaattaaattataaccctttcttaaaactccagtaatagtttatgaaactgcagggttccagtaatagtttgagactgcagggtttcatgatgctatacatcagacaactacaaagatgagaaatgaaattattaataaaaatacagtgaatctggactggggatggaactcaaatagtagagtaattgcttagcatgtataaagaccttggttcaattcccagcactatacaacctacacatggtagtgcataccagtaatgttacatagcaatttcaagaccaccctgagctacagattaatatcctctctcaaaataaataaataaataaataaaagaatatagtgaatgcagccaaacacttgattttttttaacttttttggtataagtaaatatgtatgtctaaagtatattttcatatacataggaaaataacatcaagaaaagatattaaatggaagatgcataggctattttaataatatggcaaaatattccacagcataaaactgctatgtaacaggaaaccaggaaatagttttctcttatacactaaattatacttgccactgggacatacaaagggttctcctactgttttgcaaatgaaaaggatattaaatgacaatcataatcacagactagagtgtcactatggggccataatttaaggactcaaattccaactctaggagcaccgaaaccttttaagtcctcaaaaaagaaacaccacagaattcctaagtttatgaaacacagggtgtaaagtcccatatgctatatgaagtattgggtcctacacatcaaaaggcaggtagatgcaaacaaagccagtgtcaacagaaaaagtccctgctctcaaaaaagaggttgcctgaaaaatggtttaagatttcttacattcccagcatgatgctggcaggctgttttgtaaaatcattccatttacattcacacattcttttttttaaccttgtaacatcatgctgctagcaatcactctttgaatactggcaagttggagaattaaaattgctttgtgtggacattctcaaatccagggttgacctgagagacaaattatgaactaatttgaaaaccaaagcaacaacgggcacttaatttttacttcagaaaattaagctttacttgggaacaaagatctccaatataaaaactgatttagctaactaaaagtatttcaacagcacaaaattctagatggccaaaatccttccagagctgctgtaccactcactaccaggctgggcaacgattgcaacagctagatgccagacttccctcatccaagtgagtgacatcagaggctcaagcacttgagccaacccttctaccttgaaggtcacttgcagcatttactgccatcactgacctagtccactactacgggtcatcactactacgggtcgtccgggtcacatctacacttagaagactggaagctgagactctcaccagtatggatgcgagttcgttttagggtaaaatttaacacatgtggagctgcctccaaacattctccaaacacacacacacacacacacacacacacacacacacacacacacacacacacacacacacacacacacacacacacacacacacacacacacacacacacacacacacacacacacacacacacacacacacacacacacacacttacttttctatcatttcatctcaggaacctagtaatttttggaaagtccatgtttagtagtttcccttgcttgtgctatatagagatgaaattaaacccactgatcaccacctccgcggtcctgttgtcctaaaataaacacagacttcaacatctcctcccatttccagtgatttccaaagcctgagaaggaatgtttcaaccaacaaatacattcccactgaacggctgttacaccgccatgcatgagacaaatgcgctcaataatcccacgtttgctcgccccagtatttgttttaaagctcttcctgctgccccaaaacgcagtgtagtccacaaacagcgaggccgcacaccaaggcaacaatgaagtggcccagctttactcctggcagttaccaaaagctggggggggggggagagagacacgggacaccacagtcttgactaagtggtaagtggcgtttgttcttttgttatggttacatacatattttttcattatagttaataatgctcatgcccaccttaagagttatgcccacattaagagttaacaaaaaaaaaaaaaaactaacttaccccattccagatattcaagaatgttcttttctcttctcaatggagaattattgcattcatcataaagacagatgagtatgtccagcaacgtctccacactgaagcactgcccattggtctgagctggcccatctaaaataaactgctccaactgcctcagacgtacttccccggacatgtttgcttcgatttctgctggttttcttttaatggcccttacgatgtctactgttactacctgaacctaaaattttaacggtgtggttttaaaaaacaaaccacttgttatttcaacaactgtcatgcaatgccggtgctgaattaaacatccaacacgccagtcacttcacttaacggaagcgtcttcaatttcacccatgaacatatatatcttgagggtaagtttccataaaatatagatttaatatttttaagagaataatacaattaaactgtatacttaaataaaataataattaaaagtacaacgaactaaagagtcaacactttctttcacaaaaaaaaaaatccttcattcaaaattcaatttcgtgcaacataatcctgaaacgaatccggttgcatcattaatgaataaagtcctcttggcatcagcaattcacttcccgggaagcagaaaaactggaaaaggagcaggaggggggaatgtatggagggggagggaaagccaaaaattctgctgcaaatgctcccaacctccactcggatagcgcctgggcgagtcccccgcgggaagggagggcagctcccgcagcggctctcccggctctcccggctcggggcacgccgagcctccgctcccgagctctttctcttctagggctctgcagcgagcgctgcttccagcgggctgcggcgaggacgcgtcatcttcctcggggcttctcccggggcctggccgccggcgcggccgggatgaggcgggctgcgggtggctctcgcgccgggctccgggggcggcggctactcggtcgcgcgagcccgctccatgccggaggccgctggcgggcgcgccgtgccgcgggcgccgcgcccgggctcccgccgccgcccctcggaggggctgcgctgacgaattcaaaggacgcgggcgacagccgcggcggcggcggcgcagcggcgggcgcctcgggcagcgactcctgtcccttcttcacagccctgggctgagggcatctttcctgacggacgcaggcggctgaggcgcgggaggagggggcgctgccgccgctgaggagaccggaggctgccgcagccgggttcccaaccactcccttcctcctctgccaggccctccctccccgccgcacgccctcccgcgccgctcgcgccgcgccccgcgccgcgcccgcgcccgcgccctagctcccgcgagctgctccgcgccgggggcgcgcaggcggaccgcggacggatgggcgccccccccgacccgcgcgcagccgagcgcggcggcccgaacgaacgaaggcgaaccgcggcccgcaggaagggaatcgcctcggctcggctcggctcggggcgcccggctcggctcggctcggcccggctcgctcggctcggctcggctcggctcggctcggctcggctcggcgctgcggctgcggctgcggctgtggctgtggctgctgcagcgaggagagggggtcccggaggactcgggtgtggaacgggatggccctcccggccaggcacgggctgggaactgcgccacgcggcctcctcgccgtccggggtcgtcgaggtgtctactgaccaaccccgagcccggctccttccacgtcctgcgccggtaccgtcggcttgtagccgccctaagaaaacacaccctgtccccccgctgtctacctgcccccccattcgtctttcccacgccccagagtcctaatttcttgtgttcctaatttgcagcacttgtgtcatttcccaggattaaaaaataatgagagactggtctgctccaccatccatgtcgtgcattcatgttctcaaaggagagagattcccatttctgtttcccccaaagtttcccgatgtgaagcctggctttttctcctccggaaatatgctagatcatgcctgttattctccagccaaggttacagccgaccagggacagttcaccactgtcagcaaacctgcagccccctctgtcagcacactcgcaggtacacacagccactctgcaacccaatagcaacctaatgcatttaaatgccaatcactcaggagtcaaggcacctgctgccggtggggccctttctgggtttgtaatcttgatttttcagagttccctccaaaatgctcatggaagatcctacttttgctacagctaaactgggtcatagcatttctgttacgccccaacccccagaactgccatctgtgatcgtcccccaaaacgtaatttttttttatattccttccccacacccgtttcccatggcaatgcatgtaatgaatcatttttacgtctcagtaatacaaaaacagagaaagaaccaggagtgaaggcctaaacatgaggctgaggttaaagatgtcgtgattcacgggacattgtgaatcttttctgaaatttatgctttccaaatctactcttgcctgcataaataaggacagcattattttcaatgtgttcttgacatatgagtgatatttaaataggttcggacaaagaattaatcatttccagccatgacatctttatatgtgtctgttctgtaattgcacaagtaatgaaattgtaaacatgaaatgtcatactaaactagataatgttatttgatactattagttactgttgttatttcattatcattggtgtttacacattttaagaaaagtgttacatagtaaaggacaattttataccctctgtaattatctatgtaggtcaagacatgttcttcagccaccaagtttttaagatgaagtcgacacatttttaacaatttcatttgcccgtgagagtaagtaataaagaggagcacactcagaccagaccctgacaaccctgactgcctgggttctagccccaggaccaatgtgatagaaatagagactccaatccccactcaaatccccactcattgaccctgagctccacactcctaccggggcatgcagtgcacatacacatacaaaataaataaactaatttttaagtctaaaaataggaggaaggtaaaacttgtcggttctctttaaatgtctaactggtcacggggatgtatgaattgcagatcctactttttttatagggcttggaaaggaatacagggtggcaaagatgctgcccactggaccacccaccccccagccttaaacacaattgttaacaaaagtttcaagctgcctgtcctctatacctattcttttagcacatgggtaccacccacagaccagggtattgaaattttattaaaaaaaaaaaacttcccaaattatttagagaggagaggagagaatttatttaaaaaaaaaagcacaaagagaaggaagaaggttgaacccaatcaatttcacttgaataattcaagcttagagacttaataattaactaaacactaaacacattgtacgggtgttattttaaatgttccacttgaagtgtgaatgtgcttgttaatgaaactgagctcaagccaaagaaaggggcagcccccgtggtgttggtggtggtacagcgcttgaagagctacagcaaaccatgggctgtctggcagggtgctctttgggaaaagagcctgggggaaggtctttgtgaaattcagcctaagaatcagaggttaaatgtataccacagcacacacccagtgctgttgaaataaccagacttttatggagatgtggagaactaaccctaccattcagaaaagaaaagacagaggacgggactacagaatgggaggttaagaaaggaaagacgtgattaaacagcccccaatgtaagctttccaattaattctccaattcagggctaagagtaaaaaataaaaagtcatgtaccaattaatatttataacaaccagccctatgcttaactggtacatcttactcaagaatagacatagtttcaataatggagagcaagacctggggagatagctctgtagacaaagtactttccaagcaagcatgaggacttgtgtttgattccccagaacccacataaaaagttaagcacaactacaggcacttggaactccgaacaagggaggcaaagtcagacagctccctgatttgccagactagcctacttggcaaatgccatgccagttttcctttacaatctcacacaaaagtacacctgcacacatggaacacatacattaatttataatagtagagttcatgcatagtaggacttaatgtaaagtcaaacctccatatttgatggctttatgtctgcagtgtcagccaaccacagatagaaaatatactaacaacatatgcacttttatgtttgtcagcattccataagtaactcagtataataactaattgcacagcatttatattaggtatttaaaataatctaggggtgttggaaagcatataggaggacatgtgtaagttatatacaaagactatataaggaacctgagcaatcttgcattatactgaggtgggggtggagtgagaagaggtcctagaaccaatctccagcaattaccaggaagtaactatagtcccccaaccctctgccatctacaaacccccaagcctagttgtagaaccaaacccttgaaacctctttgtgcattagctgcctttcctggataagtgtggccagcactcctccctcaaaaaaaaaaaaaaccaaaacaaaacaaaacaaaacaaaaaaaaaaactctttacagtgaatggagactatctcagaaaaccacaactggacacgatgtagagatcaatggattatggagataccaggaccaacagatacagatgcatcatagctcctgcatctatggctcagggaacacctaggaagggggacagaaagattgtaagagccaagataccagtaagtctgctatgaaacatatctcccctagaaatggctgtataaacaagactggtaatatcagtggacatgttaacatggaaggagacatttttgtggggtcccagccccctaggtagagaactacagggaactaatgactgctgggggagaataagcctcttccagggacaagcccctagagtggttgtccactgcagagtggctgtccccaaatatgcacacaaacaacagactcagcagtgtgtgtgtgtgtgtgtgtgtgtgtgtgtgtgtgtgtgtgtgtgtagcgaaaagaagctatcatcttgagaatgggaggaggacattggagggactgaagggatgaaagtaatgtaattctatttcaatttaaaacattgtttctaatttttaaaaacagctacatagaagcattgaaaatcatttgctctctcccctttaagtccacttatcctctgaagacagagtgcagtagcaaatgtgagtccttacatcaatagagaagtcccacccttcagagggaaaaaggaaagtgagagacttcctaattaatgcttgctttcttttaaaacgttttaactttttgccattagtggcaggggtgggtgcttgcgaaggcacacatgtggaactcagaggacagctttgttccagagtttgaactttaagtttgatcctccctcgacacccatgtataaagcccagtgaggctactcttgggaggtagaaacaggagtgtccccgaggctcactggccagctagtctagtcaaactgatcacctccagattcagtgagagatccacttctaggagggaccctatcaaaaacgacgttgaagaagaattgaggaaggcacagatgttaacccaaggcacgtgcacatacctccacacaaatgcacaccttataagggaaaaaaattttaagggggctagggtatcactcaagagtatatatgcttgacaggattcagtctccagcactaataatgaaaaatcaaaattaaaaattgatttttaaaatgctctatttttaaacaaccattgtgtgaactatcatggttttaatggcagcagctcttctattttacatttattttgttttttattctgtctgtctgtctgtgtgtgcatgtgtgtgcttggttaacttgggttcacaaactaacatttcccacagcttgtcagcagatcttgcccgttttgccctatcttttcatctctcattaaagcactacataaacagaatttttgaaactatttatggtcaaacataatacagatagtatccactgtcagaactactaagtgactttgaacactgaaaagataactagaggccttttataaattctatctgcagggagcatttgctaagcctctaggctccagtgtgatggtaagagtcctcttggtcctgagctgggatagaagcatggagctagaacctaggtgctgacagccaaccaagtgagcattgaagggtctgcttaccacactctggaaactctgagcacagtagccagtgacttccacagtactgaagcaacggtccatcctcatcccacctccacagcccccctctgacctctgaacagtgtttgattgcttatcaattggagcattttcccttcacgtggcttctgcactctgattcgtccttctcactctttcttggtctctttactggatcctcctcacctttctgatcaccaaacactggagtatccctactggagtatcccagtcacttcgagccttccctcctcttttatacccattcactgggtgatctctagtaacttggtaaaaatttggatacagtgtctttcaaagacttgttggttgaaggcctgacacccccccccgtagcagtgttcagaagtcattgcgtaataagggctctggcctggatacattcattaactgatggcttcatagctaatggactgttggaaagtgttagaaattctaggaggtggagtccagttggcagaattatacttcaaaggccactttgagtatgcctttgaagattatattttgtggccaacatattctcccctctctttctttcctttctttgttcctggctaccatgaagtaaacatttctgctctactatgcctcctcagccctgaaagtcaaatgactatagacagacacctctgaagctgtgagccaaaatgaatctttaatcttttaaagacaaaagacttaaagctttaaatattatgtgtggtggtttgaaaaacatgacagattattcaatattcctactgtgagtttgggtctatatcacttcaagtgacccacttgcaacaaatagaatacaacagaagtgactacttaatagcccaggctggaccatataagacatatagcctcaggttgtctattggaaccttgcagttgacatgtaagacaaattcaactgtccatagcttcatactagtaaggcgtttgaatcatttagcatttctagacaatagagatgtctactcaatcaccagatatgtaactaaagatgctgtcttaattaggtttccattgttgtaataaaacacaaaggccaaaagcaacttggggaggaaagggtttatttcagtttacagttgtagcccaccatgaagggaactcagggtgggaactcaagacaggaacctagaggcagaaatggaagaagaaacccatagaggattgctgctcactgacttgctctccatggctcatgtagcttgcttttctattcaacccagtactatctgcccaaggatgatacttaccacagtggacttggccattccctatcaatcaagaaaatgccacatagacttgcctccaggccaccctgatagggcattttcccagttgatgttccctgttctcagatgtctctagccttgtattaattgacacacctatcattcacaagaccttccatgatctggtccctatctgcctcccccaccccacccccacacttcgtctatcaccactcctgagcttatcatgctatcattttacattccaatcacccccctcttacctccttccacccccctcacctcctcctaccctccctcatctcaccccaaggccactcccagtccacgccttctcagaggtaaggactcccaggagaagtcaacatagtctggtataataggttgaggcagggcccagtccccctcccatgcattaagactgagcctggcatctcaccataggaaatgggctccaacaaactaggtcatgtaccaggtttgtattgtgatcctcctgccagggtcccctctgatagtccaagcttcataattgtctcccatatatggagggcttagtccagtcccctggattctccacagttgtaggtctagggtccattagcttccacgagcttagttcagctgtcctatagatttctccatcgtgatcttgacctcccttgctcatatgatccctcctccctctcttcacctggattcccagagctcagcctggtttttggttgtggatctctgcatctggttccatcaaatactggattagatgtctatgatgatagttggggtatccatcaatctgattacaggggtaggtcatttcaggcatcctctctactattgctacgagtcgtagttggagtcctccttgtggattttaccaggttttcccctaagcccatagtggctctctctcttaagatgtatttgtcatggacagcttatgttgtcaagaatgtggagtcaggggaacactcctccactgctggtgggagtgcaaacttgtacagtcattttgcaaatcagtatggcgggtttctaagaaaattgggaatcagtctacctcaagaccaagtgatactactcttgggcattcacccaaaggatacacacacagacaccacaaggacatttgctcaacaatgtccatagcagcattattcatgaaacaacctggaggcccatcaactgaagaatggtaaggaaaacatggtacatttgcacaatagagtactactcaggggtaaaaaatgaagatctcatgaaattttcaggcaaatggatggaactaggaaaaaccaccctgagtgatgtaacatgtataattttcatgcttttttattagtctgttaaaaatcatttataccaggcttgtcgatacaaaactcagaactcaggagtcttaaacagaaggataatgaattcaagaccagcttggactatgtaacaagatcataaactcaaaaacctaaactcaattaaattaagctaataaaagtaaagtttgtagagctaaggagatgacacagtggttaagagtgtgtattgctcttgcagaggacctgaattggagtcccagcacccacactagacagctcacaactgcctctaactccagctccaagggatctgataccttcttttgtctttctggggcatggcactcccaagcacaaaccacactcacacagacataataaaataaaataaaatcctcatagtaaagtttgtgtgctttgagcaaaacactgtcgtaacataccccataataaggtaaaagaaactaccagttattgattgatcatagactatgccttattatcaaactggaaaaaagagaaaactcaaatgagttgactaaccttgaagcaaagaaaacattttcctgcggaggtttgtgctactgttttccttcttaaagttagacaagtcaaagagaaccatttccttaagagaagatttattttacacagaccaaagggaaaactctcaattatcaggctcgtgaattccaaaatcagacagagattgtgggactgtagtccctgaggttgtaagtgtacacttcagttcagttctaacaggcatcctctcagatggctcagaaaccacctgccagaaggtaaaaggacgagaacagatgctctctgcaggccccattcagcggcaaggttcagagtctccacaccagtatgggggactaattaaactcacggtcatatgctggattacactttagaatagaccgtgacctttctctgacccagaggatagcagcatcagccattttcaagtggaagaaatactgtgccatcagcaatgtgcttttccatgagaaatgtaacaaagaataataaaataataacaagtatcaaggcaaaccccagacctggcaacagtgtcaggagtacctttcattcaccgcaatgagaacaattgaaaatttgatctgagcgcttgactggggcctctctcacataagaaaggccaccagctttgtagactataaagaaaaattcaggcagagggtaagaaatattgtaaaataatttataattagtagatgttggaccttattccaaccacttgttcagatactagaaaggcttaggctaaaataaacacctagagaactgtatcaaggaaagacatcagaagaaaagatattgttctttactgtaacagtgtgttaactttccatcactataacaaacgcctgagataattcatttataaaggggaagtgtttaactcactaagtattgacggtttctgtcggagattggtgatgttgttactttgggcctgtggtgtcacatcctggcaggaatgtatggcagagcaaaaccactctgctcacggatgaaaagtgaaagaaagaggaaagtgttggtttcctataccccgcttcaaaaggacaccctgaaagggcttaaaggacttcttgttagtttctttgcttgttgctatgacaaaatgcctggcagaagcaacagatggagcaaaaggtttgttttggctgatggtttctgagagccttcagtccatcatggcaaagagacatgacgattagagtagcttcaccaatgccagcaggaacacatggttccggctgttaaccgggcagtagctgttgacacagcaaagcccaggaagcagaggaagcaggcccagaacctgggcagctataaccctcaaagacccacttctggacatttactcccacaagccaggttccactttccacagggtccacagccttcaaagtaagactacaagctggggacccagcattcaagtcccctgcggggacgctgtagatccacacaacaacaacctgctactaggccccatctattacaggttctatccactctcatatgtcctccctggggagcacaaggctctaccgcagggacctttagaggaaactttaagatccaaagcatagcaattagaccttgcagttctttgaaacggttcctcctaatgataatgtgtggtcccatagaaacaattgttcattacaggatcattttctgagcagtggacctgaggaacgcttgaactatccacagccttttgctcatgctgccttataaggacaccatttatttaacagcctcaaggtaaaacatcatgtgtgactaggaagcaaaggtttcctctacataaaaatggaaaggggccagctcccactgttgtcctctgacctttatacatgtactgtgatgcacacacacacacacacacacacacacacacacacacacacacagtaataaaaattttttaaacaaaacagtctagacagtgataaactgccagcttgctctcattaagtagctcttacttaagacagtaattaatcatcccacaaaagtcttaactagtcactagtaaatacaaattattttttaacaagatatattttgtttataaattacatctgtatatgtctgtgtgtgtgtgtgtgtgtgtgtgtgtgtgtgtgtgtgtgtgtgtgtgtgcacgcgcgcgcttgcgacacatacttgaatgcaaggacctgaagaggccagaagagaacattgggtctaccgggagttgcaggtcgttgtcagctattggactcgagtactgggaactaaacctgggtcctcttcgagaacccaaggctcttaacctctgatccagctctccagcccccacattattttgtttaaagatactactaaaggctaagagtttagcttaatggtacatctaccaagaatgaggcccttagtcccatccccagtaccattaaaaataaataaataaatattaccaagatagcttattttattcagctaatcacaagtacttagcaaagccccaatttatatcaggtacagagaacaaagtatatgtagatgacgcccaaacctcattgcacaaacccccaaagatatactttatttacaaattagaagccaatattatcaaaatcctttccgttggagggggaagatgatggtagaaaaggatgaagcaaaaaatttcccttgagaagacgagggcgaatgcatctttggtaactcctgaagtacacataaaacagagaaactaactttttttttcccaaaaatgaaaagaatgaaacaacattcttgctggagaaagcaaaatgagagagaagaatcaggtccctctaggagagacaatggtgtagatgaccaaaccaagcaagcctaacttaggtctcctgtgggtaattgaatattccaacaccctattctatgaggacaggtctggatggagcagcctttgagaggagacagctacagctgtctggtggattccggggtgttatacatgattatgactattccaggtgactgcagcactggttgctaaaagaggcaggaagaggtcaaacgtcgggaacagaaaccaaaatccaagaggttacacacatgctaacccggtgaaagaacagggcttagtcaggagcctctggggtgcctgggggctgaatgtgactctgcaagttatgaaacaagggccattttcaaactcttacagactggtggggtgtgcctgaaatcccctcttaagggcggagccaacctggcctacacagagagaaactcatccggcagggagggggtgggagggggcggcaaaaactaacaaatagagccagggagatggatcagtttagtaaagagcttgtcacctagggtaagggcctgagtttgggtccccggaatccacataaaagtcaggcatagagcggggcattggtggtgcatgcctttaatcccagcactctggaggcaaaggcaggtgaatctctgtgagtttgaggccagcctggtctccagagtgagctccaaaacaatacagagaaaccctgtctctgggaaagaaggaagaagaagaaggaggaggaggaggaggaggaggaggaggaggaggaggaagaagaagaagaagaagaagaagaagaagaagaagaagaagaagaagaagaagaagaagaagagaagaagaagtcatgcagtatagtgcacacttgtaaacccagctctggggaagcagagcagacagaatgactcttggggcttgctggccagctagtcatgccaaactgtggagctccaggttcagtggtagaccctgtcccctcccagacataaggtggaaaatggctgaggaaaacatctgatgttgacctgtggcctacacacacacacacacacacacacataaacagaaagacatcttgctacctgttggtcagagttcctactgtgaatgataagatcaatctaagcatagccttggtcctctgtggagtaagtactgaaggtcagaacagctattgataaatataatcaatctaaaactatctccctcactaccctagcacaatgcccaacacatgtcacagtctggctattgttctgagtgaggccaagtctgggaacctctttcacaggctgcacacaatacaaagtttgggttggcctgcctgctagtgcactagactttggccactggagctaagatgcagagtgctgtagcatgaataataaaaaacccagagacagataatagggttaaagctgaagatccgaaaagcaaatcagccagccactagctcttacctctacctcggatcaaaatgagggatcctgtctccatgaatccttagactgcactgccctccaccaaacctcagacttccccagttcctgtttcctcctgccttatattcctccctagctctgggattaaaggcacgggatccctcttgctgagatcaccttcctgtgggatctgtttctcttgtagactggatcacttttgtgtagctcagagtggccttgaactaacagagatcagtctgcctctgtcttctgagtgctgggattaaaggtgtgtgccaccactgcccagcctctatgcctatggctagctttgcattctgatcttcaggcaagctttattagatcataaacagatctaatcacaacagagtgctttctcgcctagttggctactgtggagcctgttcacagtgcaactccgaagattaaataataaggaactgttgtagacccgtgacccatggtttacaagcaatttagcctcgtaagggaaatgacttgcagagctaggggagttataacgccctcttcaaggaacaataagatggcaattagatgctaccactgtgattcctgactgcagctgaatattcactgactttctcacacacgcccattcagcaagcatccattgagcactgactgtatgccagacagtgtggtagatgtttcagtctgtgaaatttgagcatcaaaccaccctccttgctaatgctctctccagccttctcttactctcctcacttcaatctgaacacacctttctatagcaattccttttacttctgtaccctctgttttcttttcccgatctctctcccttctcctcctgtttccctctgtcccctcccttctctctttctttctctccccccttctccctctcccttgctgagttttatagcctatgctggcctcaagctcacaatgtccctgccttagcctcctgagtacgggaattacaggcttctctcagctcactctcttttttattcccttaccttcccattacactctctttccttaacttctcataatgctgaatggaaaatagattaaaaatagttactatgtaattggtctcaattatttagaaaaaaatccccttaaggaagctcctgttagatgcattaagcttgggggaaggggccaaataacacgatggtaacaccagtatactggcagattggatgagccagctgcctacaggagacagggcaccgaagggagacaatgccaggaatgtgtttgctggctactggtgagggcatgtggataaaggaaggctttccacacggggctttccacaagggcaatgaaaaatgggtcatcagtgcacattccaaagggagtctgccctgagtaaattttctcacaccatttgttctgatttccacaacacacctaggaaggaggtaggattgtgactatttgttctgatttccacaacacacctaagaaggaggtaggactgtgacctgcagttgaggaaacaggcaaagaaagtgagaggtagagatggaactagcccaagaccaaagcccactgtagtgaacgaagagaaccatcctgaacctaacagctgggtttgccggaaccaagtcaagttgtaaaaggggaccaccgtgaggggttctgagggctcatggccacagtatgctactctccgtcaacactgtgcacaaggtcctgagcacagacagttcaataaaagattattggatatataatcaagattcaagatagcaataccagaaacttctaaattgggaaaatcatcagtacacctattagggttgtttttattattttatttttaatttaatttaattttattttttggtgttttcgagacagggtttctctgtattgctttggaggctgtcctggaacttgctctgtagaccaggctggtctcaaagtcacagagatccacctgcctctgcctcccgagtgctgggattaaaggtgcgccaccaacgcctggctagggttggtcttaaagtcaacttgtcacaaattaaaattgcctgatcagggaaccacacctgaaaggccatcatgatcaccttaattgatttaggaagacccacccaattgtgggaggcaccttctggtagcagtcctggtaaaggagtgtatggcagaagcaaggtggctggccttttgcttgcttggcctacacgcttgccttggagttgatctgccttgctgctgctgatgatgatgatgaggaggaggaggaggaggaggatgctgatactgatgatgatgatgatacaaatgatgatgatgacgatgctgatgctgatactgatgatgatgatgatgatgatacaaatgatgatgatgacaatgctgatgatgatgatgatgctgatgctaacagtgatgatgatgatgatgatgatccttcactagtatgggaaccagtgtttctaggctttcattgcaggctgatgaccaccagctctctaggagcctttcagattcggggaactagattgtgactgctgaggcacccagccttgtggaccaagtaactaccaggttcacgggccctccagtgtcagacaaccattatgagattattccaactgctgaggctaccagcctttaggactgagcaactgtaaagttctcagcatctcaggggactcaggctttgttactatttacatttaagctaacttaccagattatttaacatacacatgtgtgcgtgtgcttgtgcgtgtgtgtgtgtgtgtgtgtgtgtgtgtgtgtgtgtgtgtgtgtgtgtgttttcatcccattagttctgttcctctaaagtggtggttttcagccttcctaatgctgtggccctttaatacagttcctcatgttgtggtgactccaactataaaattgttttcattgctgcttcataactgtaattatgctactattatgaattatgatgtaaatatttttggagacacaagcagtcgtgactgacaggttgagaaccactgctctagagagccagccctaactcatacaatacccagatcaggaatgcacaaatattcccgaggcaagtcacaatttgaccatatttccaatacaagttcagggtctcaagagtctattatacagaagcctgaagaattccttctaattctctcatttttataaaatctcctatcatgaacttgtaaaaaattattagaacagaaatatatgtgtgtttttgtgaatcttgatgtcatggactagtacattactcagaaaatactgaagtatattgaataactaactaggcacgtctattcttttggaaacttgacacctgttaaatatgcctgatagactgtaaaagtcactctctttacatccatttttgaaagttaattttatttgtttgtttacttgtttgcagtgctgtgcaatctaacctagccctaatacatgttaggcaagcattatatacatacatatccagatctcataaatgttaaaaattcacatttgtttttcaggcttctgtataaacacaaacttcaaagtattacattagtacatatctacaataatttagtcagtttgatcatgtatgaacatacataacctgattgtttcttcagttaaacttttacttggggatagtcatgccttcggtgacacttttactacgatatttccctgtgtgacagtattttatagctatagttaatctagagtcctcaactctttccaagggatatttgattagtgtatgtcaggtctgaagatggaagactattgtgcctaccttcccactcattttctattagaatgaatgtaaaactaaaactcaaaaagtataaggaagagagaaaagctaaggagatggaacggtgctttctgaacatgcaatatacatatgttggaatatgctgcgcccccaaaatattacatgattaaattgtttaaggtaggtggaaagaattaacctggggtctacttgaaaccatgggaagataacgatgactttgagtttcaagtttgccattcaggatctatcacatatatttcacatagaacacacaattggaggactggagagatggctcagcagtgaagagcgctttgtgctcttccagaggacccaggtttggttcccagcacccacgctgcagctcgccaccttcaacttcggtgccaggaatttgatgccctctcctgggctattcgggcactgcatgcatgtggtgcaggcaaaacgtatccatacagtttaaaataaataaatggtttaatgaaaaaaaattaagtcaacaatcacctgtggttttgccttttttgttttcacttttagatagagttctactgtgtttcctaggctgaccacaaactcctgagaccaagtaatctttgcacttggcttcctgtgtgctgggacagcaccccttgtttctgggctttgtgagtcccagaaactcaatggaatctttattaatagaaattcttcagtactaatgtgcaaaattttatttctgtgcataagataataacaggcctttctatatttggaatgatagaacaaatctcatcacaaaactgcagaatttgagaattatagaattgaaaaactcactcgtggacccaggatgggaatcacaaagcttctgcttggagatcccactggcaaaggttttaacactttactgggagattggggatttagctcagtggtagagcacttgcctagcaagtgcaagccctgtgttcagtcctcagctctgacacacacacacacacacacatacacacacacacacacacacacacacacacacacacacacacacagacaaaacaacactttactggattgtcttaatcattcaaacagtctaatttccctgcataacaacatacaatgtcagcttgcagtcatgtgttgcttaatgagatgtctgcattcacaaatgtgtcattgggtgagttcgtcattatgtaagcattgtagagtgcacttacataaaccatgatgcccatgtcagcaggtgacagagttaacagtggccatcgtctctgcagcccaactgagacaccatcatggcacaggatcacaatatatatctgagagtcagcaacttagaatcttctgagagaagttcttctgtgagactctttcatgcatcagtggtcagtcacacattagtctagccaatctgcagcctccctgggacaaaggagctgactcagatctcattcacctggtctccttttctggcaggacagcttgaacttgctcatgtgtcaaatttgagggtcctagaagagcagataggggtgcgtaagacctccaaaagtctgcaactgggcttaatatgtcctcacttttaccaggttacagtgaccaaagcaaaactcacaggcccattgtagattcagggaacagcaaaatggactttatctctgaatggaaggaagaagatgtagtgtaaagggtttgggcacaggaaggtctgaagatggcaaatattgttgaacccagcacacaaagcgcagactgcatttagcttgtgttaagctaaaagaggctgtaggagatgatactccaaaggacgaccggtaggctgtgaatgctacctaatcacaatatatgacaactgcaaataatagatccggacaaatgggtgtccactgcctcacatcaaggatgcacttttaagggtgggactgctcagaaagccagcactacccaaattctatccttgtccacgatgagagacagcaaggcactttatcattatctggagctctgaccaacttccaacaaagaactcaagctcagtctaacagtcccaagccaaagtaggcaaaaaggaagcctggccctgagtctcccatcccctcactccctgcataaatgagccctctctaccagaaaggactgatccaacaggtgcaaaagaacctgtatgttccaagagctaagcctgtccaccaagggtcttctcagatcatggtgccagcatctctcaggttaatcacagaatgaagaggggacggtgcggatgggtgatgagtgtactgggcgaggtagctacttggcctttggtgaaggaagcttgggtggttctctgctatgagaaagaaagatgaggcttctcttgtttctctgggattctgtgaggttctctctctctccctctccctctccctccttctctctctctccctctctctccctctctctctctccgtctctctcccctcctctctctgtatgtgtgtgtctgtctctatcatctatcatctatctatctatcatttgctgtagggattaaacccaaagtctcatgcacgctgagcaggtactaggtgcacaagtccagcagagccatccttatacaccaaacacctcagcttactgcaatgactgacagactgcatccatttgcatactggcccacaattcaatgcatgtgtccacattatttattaaagaatcatttgttacagaataatgggttgggtaaaagggaggcacaaaaaaagactggagagattggagagttgctagtatacaacacttattttacaagttcatttaaaataatttttattatcaagctctcttaatgctacctgcaaccctgggaacccctgggaaatttactttaatggtcaaatttgcataaagcattctccatccattcatgagagcctgttgagattctgggcttgcaagcaaaagagagtaactttaacttgggactttactagtttatgagacaacataaaatcagcatggtaataccagaataatggtatttttttccaagtaccaatggcagaataaatcagatccataatttctggcccctctctcatatgatacaagaccccaatctcatgaaaaccgaccagcccagttgtagctcatgttcatgtgggggacggacaagggcacagcagtaaacaaaggaatctgaagacagaggaaacttctccttttttccaaaagagcagaaaaaattgctgaaacatctgaaaccaaccactatgatgtcatagccacaccatcacaacagtacttagtgaagacacagagcaaggataaagtggtccagagactgccgggcagcctcagaaagcaagttcagttgaaacagaaacatggatagttgagccatgcaggacatttagaatactattattctaaaaatatgccaaggactcctattgagtgggtgcagtgaaacacagacccgtgaaaataactgttacaaaggagggggttactgtactcagagtttccagaagcaggaggcatggcagaacacacaaggtcaccatgggaaacactgaaattcggaaaacagatggggagggaaaggcagcaagggatgggggagggcagacaagtgagctctatacacttgtgctcagagagtttgcacagtcccagtggactctgggctataggggtgtttcacacgtgcttggtggctggcaggggatagtgtccctgggtgtcggtgtctgatgaaaatggaatgagaaatacaggctggattggttgatttgctcatcaaaggtacgctgacaggtgagtctgatctctgtaggatttaaccctaggaaggatgatgcgtaggcctacaagacgcccttgacgccagacgacagagaataaatacacacagtagcactgagtgaggtgtggtgtgtgtcagcagtgttagcactcaggaggtggaggcaagactgaaagtttgaaaatagcccgggcgacatagcacgaccctgcttcaaagcaaacaagcaaaacacaaaacagaaaaagagtatgggatggcagggtgggtgcacggtcacatgacaataccagataagttacatgaagtgcagaatgaggcctatggggcctcgctcatggttatcatacgattaaactgaccatccaatatgccacaggcacagtctgtcgcatctccttctctctctatgccctcgtcttttcctctacccttcatcatgcactaatatcagggcttgttgaaatagtttctgtggctataattagtatgtgaatcaatttttaaacaagacagaatggcatgtccatttagtatgatcaaacatgataattttttaagacaggatcacattactccatgctggccctaaacttctcatcctcctgcctccacccatcagacttggaattaccgatatgggccaccgcacccagtttcatgccgtattttagggttaaaacacaactcttggttatagtacagagtaacagatgcatgatcttccaaattgatgtcaacatataataaatttccaggcactgaaaatgtttagtttatgaaacacatccaactctctgtttgcttttgctttagtggcgcctgggggttgaactcggagcctcacacatgttggatgtgtgtcccactgcggagctgcacccccagccccagtcctgctccctctttgccgtgtctctaggtccacatttgtcttcgtttccctgctagaatcatattcctatttgctttctctgtgtgcattcttggaatgtttctgctcagtagagatgtaatattaagcttttctcttttattaaatatatcagacagcagattctctggatggtaagcccagagttgccagagggtgtgtgtcttctgtctgttgtgaattatgccagccggctcagcagagcatcgaagactgtttcatattatcagctgagtatgcgagacctggccctcccaaggatcgagttgtcctctagctctctctccaccatcatcgagagaaatttaagtcttttccactttttccatagatgaagtgcatgtttcctttggctttccttctgttgggtttggttaatcccttctaaaccagagaagtcagacttaaaccaggcacactcccctctgcacgaactcttcaatgcctttcatttacttgccctcagtctgtctgtcattttgtgtacgctcacacaaactgttcagatttctatttaaccatactgcattgcatttgtgtttccgagctggttgcttagttttctatggcagttcaaagtgagttggcatcgtacttcaaatgttttcttttataaatagtaaggatggaatgctcccgcacaattaccacctttgaagttattcagttttcctgttgataggaaagaaagctgctgatgttggctttctccacttcagaccaattctccggcaccctcatatgactgtaagtcttctaaatctcaagctttttaagtctgattcttgaacccattcattgcacaaagctgaacaaattgctttaaaaaaaattcatttgtccttaaagaacagagtgaattagtgtcaccccacagagctcattgctaagtgtactgagaaatcacagatctgtggcactgggggagaactccacgaaagatgggctgtaccagtctccctcaaaacacagctctttcaaacccacaactctgacccatatttctgcagattcgtagggttcaagtattctttcatgacatgcccattctccatgaagctagccacaagctccttattttcttcagtgtctccatttcctaaataaaggcatgggatggcttcaacattaaaattctagagattacaacaaactggtaaataaaagagaccttaatgaatcatactttaccaagactgcaaaatgctaactttaaaagtaatataaggaacatctggtccaatctctgcatttttatacatggggagggaagctcatcagatttggagaaatcttaagattcaactgaagtgataaatttggtgagtggcagatccctgtaaacgcagacaaaactgataacctcctcaagtcagaactttgaatatactacataacatgaagcctggctatagtcacctacgaacattcagagttattctatcaagtttggagaatgaaggtaagatagttttatttattagaaatgtgaaacagagagtctcagggtcggcaggctcaacacaaaatgttatgaacaaagtcaatatggaaatgtgcaatgggattttaactgacaaggctgaatttgtagcagaatgtgtttcattgcttccctgttacttgaaagaacaagtgaagaggcacatccctgatacacaatttagctgtttcttgcatgttttctatgttggggagcacattgcttgatgatacagtctcttccttgctcaagaactaggtgctacaaggatctgtgttaacgcttcatgtgagggtctcagaaagcatgagccctgagccagcagcagccgcatcacatagaactgtgttagatagaaacattattgacccccccatgatagatttaccaaatcagaaagtctaagttgagtctctacaacgtctctaggtgaatctaatacatgctaaagttacagaatctgttgtctttcctataactctacagaaccaatttaacaagggcacttttaaagtcttttgagttgcagacatcagaaattatagaatattcctttacactgtgtgagtatatgttaccgcgattggtttaataaaggagctgactggcctatagcaaggcaggaagaagttaggcaggagaaccagactaagatgacactgggaagaggagggcaggatcttggaagtcatgaggagacacagagagaagcaatatgaagttgtcatattgaaaaaaaggcactgccatgtggcagagcataaataatataaaatatgggttaatttaaaatgtaagagctagttagtaacaagcgtgagctattggtcaagcatttataattaataataagtctctgtgtggttatttgggaaatggacggagggacaaaaaagtctgcctacaagaaataactatatttaaataattaaataatataaatttttgaaatgaaacaagttttattgaataaatataatagctttcctagatatcattctattttctttgtgattcaggattatttatttccagcataaggtgctgcttttcttattttatgcagtgtggggatgggaccctgagccatccaggttcaggtacagctggtaaaatcaggacaggcacaaccatggttagcacaaaacagaatatcttggtgtattagctaagatcaaaaattagtatctttaagatctgcgtttgtgggtctttgtgctcactcatggatgtacacagcagctttgtctgccatcattcatgtgcctacaggttgttcatcatttatctccctgcccctagacctggattgctcttctagaaaaaaaaggttcttcctatccaatctccaaaccaagatgccccagggatggactcctagggcggaaggtgttgggaaagcttgctgggcagataaaatagcagcagctatgatcgcctgttacataaactgttgtcactgctgctgtgagaaaaagaaatttaggaagaccagctgccttgcccaaatcgttcaaagtcagtgaaaattgaaaccagaaaatttaaaggtaataacattagcaacactgtctttcctcgttcactaaaggcctccctagaaaatattagtttgggtcttaaatcaacatatttgtattaaatgttctcttttctaaaaaaatattttatgaaaattgcatacatctacaataaaaacgagagttacagaaatctaatttttcctgtccagacagatggttaaagtgtttttggcatttatggcactcagaaatgattgttacaaacttcaaacttggcagaaatgtactcccatcagaggaaggaggggaaaatcaagccaatgtacagttgtgaagatttaagggatgtggattaaagcaagatattacacttagtgggttttgtaaaaactatgactgaaggcttcctggttgaaaatgtttcacatatggattcttctaaacaaatgattgtttctgttaatgtgaattctacctaaccctagggctatcacatattaatgaagcgtacaagttagggatacacgtaatgaaagcataagaaactgaaagattttcgtcacaatactccttgttctcttcggcctcgatctgtgtctcctgtttcccctttgagcaacgtcatagcatttggatttatattcctaaggcatagcatacactctactgagtgccccagggagctagatcaacgtaagaattataaccttggatttcctggtgtttgcatgtctaaactgacagtgctggcactgtgtgctatgtgagcaggcagtttcactgagatgagcatcagtctgagtatggtttaatctttccaactctacactgccttctaccagttgagtccccgtaactgtctaacacagcccgtggcaaaggcccacttaatgtggtgtaaagcagagttcattaatgcgtgtgcacagctcacattctgaaattcaagctcttgtcagagttcaaagaagactctagatgaagggctttgtgttttttcttaaaattattgttgcctcttcttcaaatttctgtcaaagaatcaaacagggcagaaggcgattgcaaaagcaaagaaacagtattgggtcttatgtaaaggtcaggtcttggtaaaacatgagcactctatttttccatgacctttcacaataaatgttaagtttgaaaatgtagaagagaggaattagacttggctatcttttactcacagttccatcttagataattgaccgaaataaaatcaaggaagctttactctcttctccgtgttagatatgaagtatgtcctcccatacctgtgtgtgtgtgcgtgtgtgtgtgtgtgtgtgtgtgtgtgtgtacatgacagagcgtgagtgtgtatatgtgtgtgtgtacatgacagagtgtgagtgtgtatgtatgtgtgtgtgtgtgtgtgtgaatgtgtgtgtacatgacagagtgtgagtgtgtatatgtgtgggtgtatgtgtgtgtgcttgagagagggtgtgtatgtgtacctgtatgtatgcatgagagtattgtgtgtgtgttcattgaatattgtgtgtgtgtgtgtgtgtgtgtaagtgagtatacatgagagagagagagagggagagagagacagagacagagacagagacagagacagagagagggagacagagagtagaggccagagaacaacctcagctgtcctcaggttctatcaatcttgttttttgagacagggtctctgattgcctgggaattctcccagaaggctaggctgactggcctgtgggccccagagatccacctgtctctgcctccacggtgctgggattacaggcacaccaccacggcaccaagcagcttttggaaacagcattactctgtggtccctgctataggtcctgcttccgggttcccacttgaggtcctgccctggcttctcttgatgatggactgtaacctgtaagccaaataaaccccgccccccaagatgcttttggtcgtcgtgtttatcacagcaacagaaaatgacctaggacaaggtccataaatgtaaatgcaatatgtgggtcagctgtcgctgacgtcacatgagtgaggctgtgggttcctatggagcaaaaggaaagccaagctcaacctgacctggtcctggattcacggcagtgacacaaaagcacttctcaggctggaaagatggctcagtggttaagggcacatattactcttgcagagaacctgaattcagttcctagtatccacattgcagctcacaaccacctgtaactcctgccacagggaaaaactgaacgccatgcacgcctgcaccaacatggatacagataccctcacacacacataattaaaaataatttctagttgggtggaggtggtacatacctttaatcccagaccttgggaaacacaggcaggcagatagctgagttccaggccagcctggtctacagagcaagttccagaatagtcggggctacacagaaaaacccttatctcaaaaaaatctaaaaaaattaaaatttattgaagattcaaataaaagaaacataatcacagaaaagatattttacaatcaaatcctttttctaattgaatgtaatttgaaggaaacactactgttgttctcacagatgagaaaataatgcatttttagagcaatcatcttacacagcatggtgttatttgtatttaaataaaatatacatacaaaacctgtggactgcaaatatcaaaaatagtaatggtgtttatttatatctgaatggtggaattatgggcagtctttccttttagctaatttgtaaaatgcctataatgaacaaaccaagtatttctaataagaaatggaaatttctttgctttgttttaagacagggtctcactatataaccctggatggctcagaattggatatataaaccaggctggactggaactcacagagatctgcctgcccctatctccagagagctggtattaaagtcatacatcaccacatccatccttgaaaattgcttttaaaaacagtattttggataatttgtcattttctcttatgaaattaattttgcatctgggaaaggtgctaaaaagccttttaatatatgtcagccttttaaagattggtgccattgggttccgctatgctccctataaaatgctgcagactctttcagcctggcatgaggcggcatctctttctttgcaatgcctctctgcctcctctcttatttttctttagcagtgatggggatggaacccagggccctgcaccagctaggaaagtgctctaccaatgagccacagtcctccctcgtgttgccttactcacaaacccctggctcgtagatgcttcccttggcccagctggtttcccctacttttcctgtatctcaggcatgttgtttccctgggacccaccatcctgcaggcctccacattttctcccagcctacagtgccagcatccacacccaattgcccatgacttgtcaatgactgttggctaagtgtaagataatcaccttgtttttttgtttccttgaagacccaacaagaagacttagtccttcccctgaggattctgctgtgagctggctgtggtggcacattcacaccagcactgagagacagagacatgcgcatcttggggcctgctggccctccagctcagcttacctgcaagtcctacaacagtgaagtagcctgtgttaaaaacaaggtagacagcactcgaggattgacagcccaggctgtcttctggcccccacaggcactcacgcagagatatcctattgcacagacatgacatccgtgcatccacacaaagactctggcgtacgccatgggcagctgccctgccctgcccagtgtcactagcgttccaagcataagccatacctagttgcacttctaccgagttttccctgacaccaagacctgaagtctttgaaggaagataaaaacaatgtatccatccccacatgataacagagtgctgtcttctgaagccttagaggccatctgtattagtacatggtggagtgtggcaacaatggctctgccctttccctatcaactttatcaacttcattaccctctaataccaggactgacagatacaacaactgcacagggtgcctttgggaagcctcaggagataatccccaaatccactggggccaagccgttatttccataccaccacactgcagaacaaaaaggatgtgtcagaggatgggacaaattcaagttctctgacctccagcagatccacatctggggcttttccacatttagtccagatgaagttgaaaccataacagctaaaagaagctcatcccaggtggctgcagggtcacgtgtgcctggttgcaactcccttgacaaaggcccggtgctcctgagggctgacgcctttgtagtggagctcacaaatagatcctatctcctgtccagacagcaaaaacaaaccctcattttaaggttctttctgatgccctccactctcatactgctagaaacctaaagacgcccaataaccaaccacacatgcagctgtagactgccctcctgggtctttgccctctctgatggttgtcttttgtgagtaggttacactagtgtctggccctaccctcacaagcagcttcatatgtactgtgacagttgcttatacactggcttggagcttgtgaaccccctgcctcacctcttctgcatatcctacctgtgtgcaccactgcaactggctgtgaagtctgctataaatgctccaggcttgtctgtaacgtacatatgtccctccataaatccgcatagcagggacttcctactcgttgacacacatttgtatgagggcatccagcgctctcaccagttcctgctcatcaaatcaaaatgagcccaaagccactaattcagcgtgacactctgcttccacaaacagatggaggtggccaaggttcctatggatgtggtggcagaaaaaaaactagctctgtgaaaagacagtgaccatgtgaccatacttttgcaggcgtggaaaaagaaactgtgtgtgtttgtatgtgttttttttgtgtgtgtgtgtgtgtgtctgcctgtctgtctgtctgtctctgtgtgtgtctatgtgtgtatctctgtgtttgtgtgtgtatctgtgtatatctgtgtctgtctgtgtgtctgtctctctctgtgtgtgtgtgtgtgtgtgtctctgtgtatgtgtatgtgtgtatgtgactgtgtgtgtgtctgtgtgtgtgtgtctgtctgtctgtgtgtctgtatctgtgtgtgtctgtgtgtgtctgtctgcctctgtgtatgtgtctgtctgtctttctgtgtgtgtgtgtgtgtgtgtgtgtgtgtgtgagtgtgtgtgtgcgtaggtcagagatagaggctggcgtcttcctcaatgtctctccatttggttttgagacacagtctctcactaaacctggagcttaacgatttggctagcctggctgaccagtgagttttaggaattctcttgactctatgcccatgtctcagtccttcttagcactggcacagtcttttatgctcagtttacatctgtaactacctggcttagaccatatgcctttgacaagtgtttatacaggtgattaaatggtggtatgatctgagttgccacccttgcatccctgtcccattgccacagcccttcttgagattcaggattgcttttgtttagctcatgattggagagagtaatacaccatggtggggaaggcatagctgcaggaacatgtggcccaggccacattatacgggtagtcaggaaacagagtgcagtgttggccccagcccactttatcttttttactgagcccaagaccacagcctaagggtaacactgccaacactcaaagtgggtcttcactgttcattacacctctctggaaacaccctcagatatacccagagatgtgtttccatggtgattctaaatcttaccaggtagacaataaagattaactatcacagtgtctgtgggccactggaattttcacttgggcattgcgccaagattctcctgtttatctgtacaaattatgatcagttttgccctggtcaagggttactactggagatgaaatcactaatgcatagccaccatgtcagaatgccaggtcaacttctacagacagcgtcaggacagaaagagagagaaatgaagatgagcgtgatactgcagatccatagtgctgatgggctatgctgaccaacttgctactgcttagcacactggggcaatgtggctcacaaccagaatccttccaaggcttcccagaggtaccctgcatgtttgctaggatctgtcagtcctgttgctaacatgtttgttgatgtggatgatggagagagggtggagctgagctctgatatcaaagggtggagctgagctctaataaaacagccattgttaccaaccaatatcaacccatgatggcttgacgatttggctagactcactgtgcagtgagcttcaggaattccccccatctctacccccatttctcatcccttttcagtgttggcacactcttttatgctcagtttacatctgtagctacctggcttggacaaaggtcaaagttgaactagcataccaaaggtcttggatatagctcagcggttggccctgggtttcactcccaaacctgcaagagagagatgggagacaccacatagtcatggtgtctcttcacagcaatagaaaccctaagacaatgacctatctcagctgaccaccaggaagaactttgccaattacatggccccaggatgataagcactaaccctgcttcaccaaccactagtggtagcattctcattgctcatgacctgtgggtaatgtagctgtaagacccacttgacagttggctccctcagaccattcccagagccaacttccttagataccacaagaaaagcagactttgagagaagccaccagaactacatgaatagaaaaaaggactgagccaagggaggagatgaattgcattcaaatcacatcaagacctaactgagcccacagaggtttctggggccatttgtaggcctcttcagagagactgtgtgactgagcaaagtggctttctttagttactgcaaattataggaaataattctgctaagtgcagccaccactcccaacagctgagtgaatcgggctctcagtcttgaacaggcctttgggcaccaccatagcatccaccacataaagcaaattcttcctcagaaagaaagaactaataacacataagttcttccactgagaggaaggagacttagcccagatgagtcaggcctaaaaatatcagtagtgttgtcattgtgaacaacttcatagatcgaaaggggggaagtatatcctctctgacctgaagggtgttctttttatgttttgtgtatcttttcctgtaataaggacatgaaggaagaaaacccagccttctgaacttctcatgaactttactatcaccatctgtgaggcttagtcttttattgttcatctgacacaacctagagccagctgggaagagggagcccaacagaagaatttccttgatcaaactgacctgtgtgcatgtctgtgggcagtgagcagtgtcagtcagcaaacagcgttggtcagcaaacagcgtcagccagtggcattgtcacccagtgagcatcattgctctgtggttctacttgaggtccttccttggttttcctcaatgctggactgtgacctgacagtgtaagctgaaataaacccttcccccctttaagatgatgatggtcatagtgtttatcacagcaacagaaagcaaacttgaacaccagctataactaaagacctgaaattggtgcaacctttgaaatcacaatcctcccatctccacctcctgagtgctaggattttagcacgtgtcaccgtgcctggctctatatgtccttcctaaatgtattctccagccaagtgcttctagcagagttgagaactggctagctttccttccttccttttctttctttctttctttctttctttcttcctcccttcctttctttctttttgtttgttttgttttctgagacagggtctcactatgcagctctggctgtactggaactcactccgtaggccaggcaggccttgaactcacaaagatctgactgcctctgcctcccaagtgctgagattaaaggcgtatgccaccacccagctctggctagcttttctaaataacctttctctgaatccatgatactgctttcacactgtgtgccttcacaagttcagccaggctgacctctcttaccccttgtcttcctccggaattctactcattccttaagactctgagagtttattcattcataacatcgctagatttagtaaataaaatacaggacatccagttacatttgaatgtcaaataaacaacaaataatttttgtacaagtgtacccaaatatcccatggaaatatttattcccatatatcttatttagcaatcatatgcattcctcaaatgtctgttgagtatctacaatgtgatagtaactactgaacgctgggaccaacacaatggatataataactccaaattcctgctctcgttgagtttacattctagtgcatggggttagaccataaataagcgggaaagtaaatactcgagcatatcattaagacataaatagacaccatggaggaggacagagtgaggacaggagaacaggaagtgttggtggcagtgggcgttgctgttttactgagatctcactgtgacagtgaaatttagcagagccctaaaagagaaagcaagcaagattaggggagagcatgttccagagtggacctcaaagtacactccctaagatggaaggatatttggctaatatattaggggaaagcaaggaggccagagtagctggagaacagtgaccagaacaggtagctcggaaagtcagaggtggccgatatagagtcttctgtattaactctgtagagacagagcagacatgaaaatggatttaatattttagacaaagtcaataatcagttaacaaatttgttaaataagtaacttctatgctgaaaactggctctccctatgggacaggcagaaagggtagaaacaaacagaccaatcatgagagtgatacggtagcccaaaagagaaatgctaacatgtgatggctggtagctggcaccatggttgtagagacagggctgtcaagtggctggactctgaacctactgtggaagtacaactggtagaactagttgatgattacatgtggagtgtgctatgatttagatctggaattttcccaaagatgcattccctagtcagaagctgggagaacctttaggagtggtacctagttggaggtcttgcttgggtcacttgggtgtgccattgaaatattagcatcccagtctttctctatctatctatctatctatctatctatctatctatctgtctgtctgtctatctctctttctgtgtgtgtgtctgtctgtctgtctctgtgtgtatctatatctctatctctgtgtgtgtatatctctgtctctgtctccatgtctctgtgtatgtgtctctgtctttgtgtgtgtctttgtctctctctgtctctgtctttttgtctctttccctccttccctccctccttccctccctccttccctccttccctccctcccttctcctccctccctccctcccagtgtcacttaggcttgtttctaactcttagactatttcctgtcttacccctgaagagctagtactacagatacatgccacaattcagtgtgcaagttgattcattctctattgaatgaggaagagacagacagacagacagacagacagagaatagaagacaatgcttttaagaggcttgtttatcaactaggaatgatcccatatgatttagaagaaaataatggtatttaaatttaaaacaaaggtaagaggtccaggagcaaagtccaggaaccgggagacaggaagggaactggtgtcaaagtgaagaatctggccaggtcaggagcacagagagcatcacattctgagccaggatgagctggcagagagacatgggagggagggaggcagaagttgtgggaggagccattacaaaggatagtcctgtttgccttggccaagtctgaagcaagttgggagtaaagaagaaggaaggaagatcctgtgtaaactctggagaaggggcttgtgtaaagcggtcatggaggtgagaagaggagtgtcctgtggaggcctaggacagccagacagccctccggctgcttgggatctaaatccaaaccaacacagtttggtgtgtttttcttcagtcacattcagctgtccaaatgcaggcaaggagtaggctgaaaactggatagaagcaggggtggaattctggcaagcaaatgtgtcaaagtgatggagaagccaggaagtctaatgtgtgggcggcggagtatttacagtgactgctggagaactctaaattggggtggaaagaaatggggacaccagggacgaggaacaaaggacaggtggtggaattcctgggctggagggtccagtggggctgtgggattctgagacttggtgagagagtagaaggggataggaaagagatcagaatgagaagtggtactcaggaggttctggagagagtctgtgggagacttgaggttattgacggctaactgagacagtggcaatcactacaagaaaggaaacaggtatgcagaggctgagagatgatggcttctgtgcacagaccagcagacaccagcaacagttgcatgttggtgaggactaccatgtctgttttctactgatgctctcacagctaccacaatcttacagctcaacacaatacaagtggattctcttctcatacagtcccaaaggtcactagtggtcaaagtgtccacaggctgattctcaatggcagagccgccttctgcccacgtataaccccaaacactgcctgatttccttggttccaggctccttctcccaatgacatcatcccaccctttgcttctgcccagcctctcctcctggctctgacactcttacagattacattggctccaactagataatacttcccacttaatactctccacaaagtctcccttgccacatacatagtctcagctcctggagattggggcatggatgttgtttttctgttggtttatctactgatattttaactacctactgatattttaactaccgtctacaccccgaggctccacagtcaccaccctgcagctcagactgtggtctggccagatttcccatcctgctggcaccagctgggctttggctgccatatgcagtttttaacaaaatctctatagttctttttaccaataaagactcagcagtcagatgttggggtgaaaacttgctagattggagaagctgagaagcaaccagctgaccttcctttttggccagagacctatgtctctccccttgtcccaaaccaaaaaaagactgaatcttcaagtctctctccttcctgtgtatctctctatctgtcttcctggctcctctgtcctctccatggctaattcctgtcaactagttgctggctctgtcccctgatccatggtggattttattgacaccatctctgggtttcgcagtgagatcaaccatcccgaaatgcacggctatctttggagagtcattctcttgcacacatccgcttctggctgctccacctcactcggtccccgactgaatacataactttcccatttattagcagcaatgccttctttgagtgtttattgtagtaagtttggagttaatttgctattaagtagaatttgatgtcctaaacatttcactctaattctgggtgttaattaatgcgtttgtctcccccagggagactgcaaatcccaccaggatagaacccactcaaatgcacctcaatgtttcaagtgcccatacacggcatctggcatataggacaagttaatggacctttctgaaaaagtgaatgaattctggttgcttttggtaacaactgcatgtcaaaggatctacatacatgtcaagaaaaaattcaatactcctattcagttttgttattttgcttttgttgttgaaggtcttacctcgtacccaggatagcctcatattctctgtgtactcaggctagcattacactcctagcaatccctctgcctcaattgcttgagtacttggattgcagacatatacatcaagcctcatctggcttcttgagaaatactaaatcaatatgatataatacacacagatttcattctagtcttcacccccatcccccagatgcctgaaaccaaatggctaagctttcgaatgttacatatgttttaacatccaccagctaaacatattcattcaagagcatttagatataaaagttgtcagtgtttctaccaaggctaaatttaggaacttagattgggtcatgtctccagggaatttgccagagttataaagtaaaataccaaccatctctgggtcaaacaacaattagaaaatgaaaaaaaaaaataaaagtaattgaataaagcaccaaatcactccaaagcagcatgacaaagtaataatattgtgaacaaaagaatcaactgtgtgggactgcggattagctctgctgatagagtgtctgcctagcatacctgaaggcctgggttttcttctctgtgttatgtgggaaagtggaagtggtcattcatacccgtaatcctggcccttgggaagtccagccaggaggatcagaatttgaaagtcatactcagctacatagtgagttcaaggccagtctaggctacatgagatcacacctcaaaaacaaaacataaatcaaccatagatatttataatatcctcttgtaaaaattaccataaagaattagatgacaatagagagacttttgtatctacagttatagatgatggaaaattatattctgggttactgagtccattataagtcttttacaaatagaatcatcaaagtatagttttttgtttgttttatcagccaacttgtctccttcagccatgtgatcctacttttgtgggacactttgtagattacatagaccagcatcagagacccatcccaggggaggtgtggctcaatggtagagcacttgcctaacatgtatgaggtcttgggctctgtctccagcatcacaaataacccaaccaaataactgatcagctactgaactgaataaatgcctggagatttttgttatcaaaattattgaggctccatcctaattacaaaccctagtccttgccaaactatgctccctacacctacttgttaccaggaacgttatatcatgcagacacagatattttccatcacattttaaggaaataatccttgcattggttgctttgctcattgctgtcacaaaatacacgatgaaagaaccttaaggaagccactacagctggccccctatatgccaacaattttgaccttcttggtgtattctgccataccactgtgacctagaacctaaagaactcgtgtagtgttcagatacatgcatatcactgtgtaatgactcaactgggttgaacattcgctctgggtaatctgaatgtacagtgaagcctgagaagctctgacctacaacataagcttgtacacagagaagtacaagatgaggagagtgagctgaatggccagatgcaggaaaggcaaggatatcacgctagcctaaagagctcctctccccagaccagatctgcagccccccaggtttgctctcaagctcagcaattcagagatttgaggacctcagcaactttccttatttatggttagcatctcaggcaagagcagtaactgattaaaacccattcggaagaagcctgaatttcaggctggaaagtactatcgtgagttggaattcacttgaaaagataaatggtctctatagctagggacaaagaaaactgggccaaacacaaggagaacgtgccagaggagggctccgcaaataattagtagctaattttagcccataagcttacctattttttcattattcggtgaaactgtttcaaagttgtaaaatatgatcctgccagaaaagtggccccaaataatagctgagacccggcgacactgtctcagatgataggcacccgaaacagggcagcagtccaagtgtacagacaggcctctgcctctcccttctctttgcgcatcctgtcatcaccgttgttgtatttcctcttttctttaaataggattataagaaagcaaactcctagtgcacacatgtccaagccctgtggagagatgatttcttgcatctctacagcattctttttcgtttagtcttgagccacagtaaatggctttcatgatagggctgccttgctaactcattttgcctgtgcctccctctgacccaggaacactttgcccttcttttggtggctctccaacttgatgccatcttgagtctgtttttcctgcttcttcccctgggcattggtctctgctgaagctaaaagtgggttctgttattaatgggcacttactggtatttcaaagtcacattgggttccattctgaacatccaatttgatcacattctgtccctgcaagcggtgtcctttccaattctggtgattctgagatctctgtcaaagttagtgataaaaggcatttgaccagcatgtccttagcttagttaataaagagctagtgaacagcgttgcttagagattttcaacagacttatcactaccagtggctcagctcctggttttaggtctcctatgatgtagaatggaccaccctattcatattccctaagtgacttcaccccgctgtctgccaccacctcccaccacagatcctgcccctttagcgcaaaaggaaatagcattggtctggcataatcctctcttaactgagccatgccttggcattcataacgtaaggaaataggaccagtttctctgcccgctggccaaggcactctgcagagagcccagtgtggtttctgagcggctttctgtaaagtggggcagagaacaggctgggtctcccgatgcccagaaacacatatgggcaaagatatttgttagtaaaactggctagaatgattcaaggtctgaggtcacaagggactgagaatagcagattagacagacaggcaaccaccatagataaaatctgacctttccccacaattccactcagcagttttctgcagcagccagagaggaaagccaccctccacccctttaaatctaaccagcaaggcagatgattgtcacgaaaacacagctaccttactgcaacaggaaagctccccatggctctacgtgtttaagcgatgccctcaacatgcacgggcagcccatcagtgtaagtctacccagctttaacttgtcctgataatttgttttttgggttaaatgcctatcactttcctggggtcccctggggaactattttcattccttggaaccatgtcctttcaagaagcaagcttcattcttccctctctggttctgatttgaccatgacatactcattgtttgttcaaggtcaaatatctcctgtttgcatgttgagctcctttgtctctctgtaagcagccagacgtcggggactttgtattctttccttaatacgagtattcctcatcttgtggcaaagggaaatttttttctggcaaatgtcaacaccagaaagtaagaaggcaaggctgggtgtattggggccaaggttagagaagctgagacaggcgggagagaatctaattgtttcttggaggctcaactttagggtttagaaattcatttttcattacatttgctagactgaaaattgctgtgaaaatgtgacaggtggtagtgggggggacgacacttgttctctttcttaggactgagcagcaggagccccgctctttccctttctggtcacagctatgacagcctgactgctggggaactccttctaaactatgcccagaggtcctaaccattgctccttgacaattgcctggaaatcaaggtctataatgcagaaaaaggctcttccaagaccagatgcctcccctctctttcttaagtccaacatacacgtctgaaccccagctccactgactcagggatgttctcatgctcccctgagacccctccacttgccctatgtccgggggttccatttctctaccttctctagaacccatctccccaaagcagctctgatggcacagactcactttgcaggcagcttagctggcatatatctgcttttcccactgagcctcacactctattgggactagcagctgatccttggtttctccaaaggatggctggatcctgctatgccttctaatgtactgatcctcctggaatcaacgtaatacaattcagactcacctagaaagagtgagtctcaatagaggaattgcctcaatcagatccaactgtgagtgtgtttttgaggaatttttataattgctaattagtgaaggagggcccagcccactgtgggcagcaccatccctaggccagtagccttgggctgtagaagaaaggcagctaagtaagttgtggagagcaagccagcaagcagcatttctctatggtattgcttcagttcctgctctaggttcccacttgagttcctcccctgactgcactcatggaagtgtaagccaaacaaaccctttcttcccccgaagttgcttttgatcagtgtttttcttctttgtttgctttgttttgtttcttccaataccaacaaaaagcaaattagaacacctaccatgtactaagcatagaagaaactaaactattgcttttctaagacgcctggagtcatagagtcaaataaataataataactatgcttacaaatcggggaaaagcaggggtcataaaatgccggcttattggttttttgagacaaggtttcaggtagtcgatgtcatcctggtacctgctacacagataaagatactcttgaactctttatcccccggtatgcccctcctgagtgctgggtgtgggtgtgcatcatcactgttgcaaagagtattttggaatctcaaaaaagtaatgtcttacccagcgttgaaaattcaggaaaaacttctggataagtctggagtaagacttggtacaggcaaatctagtgttacttggtacaggcaaatgtaaaattaagttagcaaggaaaaaccagattacagctcagaaaatcagtttataggctcagggtggtggtttatgcctgtaatcccagcatccagaagactgaggcaggggactgtcatgggatccaggacagcttgagctgcagtaagagcctgtcttaaaacaaaaattatagtcccataaaggttcagcccccatatggaaaaagttgatattatatccttgaccaaatccatctagccagccagccttcatgctgcaagtgcaatctgatgctgtgaaatgcttgtcggcggcagttgctgtgtcctggggggaggggggagaatagtttgagggctctgggtttattaaaatttttcataacagatcctcagaggatccaggaaacctgggactccactgttgctaagaaatgtcctcccaagtcagagaaatggaacacagacttagggatggattgcatgtgacccagctggcagaatggtacccagaaccctttgtgtctaaatgttccttacagagaggcatcagctgcccatgtctatgtgcaaacaagccacagtcctggtctacttaagtctgctgcttcctacaaatagaaacaaaaaagagaagaacagcttatggtctaaatgagatcaacccatctgacccacaaaaaaatatccaattaatttacaattagacaattaaggaaattcccatggaataagtgaacttgggcttttaactcattctagttaaaacctggaggtacagttggttttagggagaaacataaatatttctgtatttatttggatttggatttcttacttttttaatgatttatttttatttcatgtgcattggtaatttgcctacatatgtctgtataaaggtatcagattcccctggagttgcagacagttgtgagctgccgtgtgggtgctgagaattgaaccctggtcctctggaagaacaatcagtgctcttaaccactaagccatttctccggccacgaaggcagggtttaaatgagttcaacagacccaagataaatgataattatgtatttattagggaagcacttgcacagagaagagtaaataatcgccagggtcttcctgctccagaagatgctgtctctgcccttcggatgctctcccaacccaagagagcaagagccagcccctcctctatcttataatgggtcacagctgaacctgaaaccatgcccaaagggtatgaccaccacaagttccctggcaaggcaagatgccactatatagcctgagtttcttactttaaaaagggcccctggcattttcttaataaaaagtgtttgtatttctctgatccccaaaaggcagtaatggtgtgctatattttgtgttgtgaagatttaactcctaaaaaataaataaaattgtgcaggggcacacacctgcaactcaggaggcagaggcaggacctccaagtttggggtcagcttgggctacatagtgagctccagggccacacagtgaggcactgtcaaacaaaaggagtatgtgaaatggctcagcagatacagaggcttgctgccaagtctgaaacctgagtttgatccccaggatccacatggtggaaggaggaaactgacttgctgaaagtgtcccctcacgtctatatgtgacctgtggcactcaaatgcccacccccacccaccccacatgaacatgtaagtaaataaataataaataagtgcaatttaaacttgtttttaatattcaaaaaaggataaatgtttactgactgaatttcaaaaccccatatttggagagagggaggttaatcacccagtctgtttgcccagggtagtgactcacatactcctggcctcgttccaaccctcttaaccagaatgtaagagcaagccctgcgtcctgctcagaatgtccacatttcacgtcctgtttgttttctgggtagggtctgtttgtttacttccctctcaatgttgggttgttctgtttgtctgaccttcaacatgtttgtccatacagacttgaaagcttggaaggcttggactgagtggaagggacacccgttttaaggcttcatggcactcgagtggctgcttcaagaagatggtttgaatggagccttcgggaaatcgtaatgactgacaccagcctaaacgagctgaagaaccacaagaaacagcctctctctaggagagtactgaatgacatcagtgtgtgtgtgtgtgtgtgtttacacatagtcttcactgctttgaaagtttttctctgtgccggggtggggtgggatagggaagatggggggcctgggggtaagagttgggggggggggaatccctagtgctctctgctcaacttctccattttaattatacatcttagcaacacctgcctagaaaacattctgccatagtcaagatgggtgttccctagtcacttaacattctcaagacaaccccccacaggcatgccctgaagcccatctctcaggtgagtttagattctgtgaggttgacaattaactttaatcgtcacacactgcattgttgctttgtcctgaagtcatggcactgttatgtatttccagcctaaaaatgactgccctatccatacttccacatgccacctccggcagaccccccaggccttgggcacaggctagaacatctggggactcttcagttggggtgggcttcagccttggataaagatgggtgcaagtggggagctctctgtacagcatgggttaaatctacagttcccacgggtccccaaagactgatccaggcacctgggactcaggcaactgcttgtcagctcagaagttcctggtgcactgatgcttgtcaagccatttgatacttttaaattattttatttgtatgcgtgtggccatgcatgccatagcaagtatgtggaggtcagaagacagcctgaaggagtgggtgtctccttccatcatgtgggtcccaggatcaaactcaggtggttgggtttggcagcaggtgcctttacccaccaagccatctcactaaccccaatcatttgattttacagatgaagagattgcaactagaagtgatttggccaaggtcccagagcaaacctatgactgggcctcaattagagtactagaaatcacctttttcactttatcctctaaggatagtacctgaatgctatgaccaatcttgaatggagtttataaatatatgtgtgtgtgtgtgtgtgtgtgtgtgtgtgtgtgtgtgtgtgtgtgtgtgtgtgcaaattggtcatgttaaccttcagaaaacatatgaaagctgttagcatgtaccatcccatctcatgtggtttattcccacacaagtggctacacaagacaaatataaatgtctcctctggtaatgtctgattccaggatgtacacaattaaggcaatttctttatcagggccagtctatccatcatatgtagaaggatttgcagagagaaggcaactagaaaagcagtcaagacacgagctctctctccgtttccagctccacccagcaacctttacagttactttctgtgttgttctgctttcggttactatagcaagacacctgagagcgtcaactttaaaataggaaatggtttttgtgtctcacagctttgaaggcttcagttggcggttaggtggcccccgtcacttttgggcctctgggaaggcagcatatcaccaagagagcacaggctagaacaagatgatgtccatagcgcaaccaggaggtggaagcaagagatggaggagacagtgggtttcaatatccctccaagagcactctactggggacctaacttctccactaggtgctcttaacgtttcattaccattcaagagtgcccagttgaaactaagccttcaacacaagggcctctgaaagacattccagattccccactctaattagactcccgattctagcaccttcctttccttccacctggctcccctttgctgttgagatgaagtgtcgagttctacatacagtctaccagtccattttccattactataatggagtaactgaagcttagtaatgtagaaagaagcttttgtagcccatggtttttgagtctgagtgtcgaaatgagaaagtagcagctctcacaatagtcaccccaatactattgtatcacttcatgacatctgtcatcccagtgggagcatgtgtggggaggagtgatcacagttgagacaaggaagccagagcatgaagaaagatctcattctcagaactaacttctgagggtgatgtcctcatcaaactcccaagttccccatcactggtcccatcagctctcaacactgccaccctggagatcaagcttccaacatatgaacccttggggacacactcaagccacattcaaactgtagcacaaggtacacaaggtccttcagcctagctgtgcctatgattctgccaaatctctcaccatctcctcagccaaccaactctgtgccaaattggatttcctaggctcttaatgctgtagcctttccttcggctctgagccttcacacttatagttcctggggcctggatcttccacggtgaccatctggattgctcttattcctcttttgttctctcacaacactcatttggccaagatatctctgaggaaggaccatctcctttaaaggttgcccaaaatgtgactcagtttgccttcctggatcaaacaaatctctgctggaatttcaacttacctatgtatgtgtttgaattcatttagttgtgagttaagagaccagggatagccttggatttttagtgttcttgataactgcagcaagtaggccatcagcaaatgctggaaaaacacaacacattgaagccaatgtctccaattacaaatctttaaaaacacatttcattgtgatacaatttacataccatacaattcatccacttaagtatacaattaggccaggcctggtggtgcacacttttaatcccagcactttgaggcagaggtagatgggtcttatagttaaggccagtctagtctacagagttgcgagacagccagggctacagagagattgcccatttgaacactgcattaagatggaatcatatcatttataatctttcatgattgtcttctttgacttaacccaacttttcaaagcttaatcactgtcaaaatttcatttgtgtgtgcctgtgcatttgttttcatttgcggggggtggtagaattgtttgggtggaattgatgggccatgtagaaaccatgtgttcaaagttttggagaatggcaaggccattatccaaagcaacggtgccatttacatccccaccagtggtaaggagggtccagtttctctgcatcctcactgactcctgtcactgcccctctttgtcaccttcaccatcctgttgtgacatggtatctgattacgaattttccctgccactctctgtgaccaataattctaagcacattttcatgttcttagaggcaacttgttcattttctttggagagatgtctcaaattatttgcccatttccaaagtgggttattcgtatttttattgttgtaagaattctttttatgttttaggtatgtctttcgccagatgtgtggtttgcaaatgtttgtctctaattccatgggttctctttttacttccctaatgttgttcttgggagcacaaaagttgttttgtttttcaagtccaatttatccaaaatcaggcagcactttatagcccataatgaggagtctagattttattccaaattgatcatttttaatttattaatttccaatctttcctgtgtgtgtgttttatttttatgatgcttgtgccctgttaccatattaagaaactttcacctaacaaaaaattatataaatttcataccagatctttttctaggagttgggcactggtagccacctctcccccacatttgtgcctataatgacttgagttaatattagggaatgacttgaagtcagggttcagcttgacctttgtctgtaaatacctattgtcccagtactgtttgttggaaaatattgtctctcctcttggctcgcttggttcccagctattcccaactgtctataactccagttccagagatcagacattctcctctggcctccatgaacactgcatatacacttgcaagcaagcaaaatacttatccacataaaatttaaaaacaaaaatgtttggaaaaaatgagagcaggtcaagccaaacctgacaaaaataaagggctcaaagaagggtatgtgagaaaacaagaaacaaaaacaagcctggtgtggtgatgcacacccttaggagaagcagaggcaggaggaccagtctggtctacagagagggtggggtgggggtgggtagaagattggagagagggaaagaaagcagaaagcaagatcaggcagcacttggtagcccagaaggaaaagtttcggttttattctaaggcaaaggaaaaacccttggagaattgaggcgagagcgatggacgctatctgatttgtactttaaagaacaattctgagggacgagaaatctgtgaccttgagctaggcagacatttcttagttacagcacaaatgctggatctgtgtgaggaaaaaagatcggaaattggatttcatataaattaagatgtttttgttttcagagaaacaccatcaaggattaaaagccaaaccacagccagtctggcgtgtcaggggccgctgcatcttaactacaagtcaaaggctgagcaaattgaaaaagcaaaaatgaagaaagtgatgccccggagcaaacctccatcttccaggcgcaagagacaggcaagatgtagacgcaaagactcatggtgcaggagagcagaaattagcaggcagcaatctctgcagcatcagggcagggtagggaaacgtgaaccacaactgacagtagttggaggtttagtgtagacagatgagtctgagtcaaaaactccagggttttggagtgaggggaaatactcattttggaaagtgtctgttgtagaaacaaaaagaggatcctgaattccattcccagatcacaggtaaaaacacaaacaaacaaaagagatgcctgtgtatgtgtggtgactcacatgtataaataatcccagagctggggacaggagagatgggtagatctctgaggtttgttgcccaccagcctagccaactagccttccaggctagtatctgagaaatgacacctgaggttgtcctctgccacacacacacacacacacacacacacacacacacacacacacacacacacgcacgcacgcacggcgcacacactaagtaaaagtaaccttagaatgaagggagggaagagagaaggaacgtagacactgtaggcacttcactcaagaaagcttacatgcagtatgcaagcacacaagatatttgatgtcaccagccgtcagatgtcactgcaagctaaaagcgcagtgaggccacacagccagctcaagtgaaatgatgaaaatgcagaggaacgtgaggagatgctggttctctcacacactgctggaaggactggaaaatggcaactacctcggtaaacagtctggcaataccttgaaagatggcttataacttggtgatagtccttgctggtctgtatctgaagggaaatgaaaatttatgtccctttgggtgtgtttattatctatgttaagaatcaccgaagggtatggctggggctgtagctcagtggtacctagcatgcatagaagtcccaagttcaatcccagcattgcaatagttaaaaataaataaaaatggggaccattttcttgcagttgtcttgacaagaaccatccaaacctgtaaacaacctaaatgtccttgtgcaggcaaatggatatacaaactacggaatgtctacaccatggactattagtaataaagaggcatatactatggaaacaccccaatgcagatgaaactcaaaagccttgtaagtaaaaggacaagaaagaatagcattactgtgttaccctattatataacattctggaaaaaagcactactttggggatggaagatagtatagtatttgccagaggctggaggtcagaagaggagtggactgtaaaggagacaggagaatatatttagggctcttctgtggctttgttgttgtagtggttacagaacctacagattcgccgaacttcgagatcacagcgggtgaacggcggtgcaggtccctaacacgaggctcactgagagaagagcaggttttaggggtgtaaacccaatggctctttccgacttttgagtttagaagccaattagtgtcttactttctattctgttgctgtgataaaataaagttgtcacaacaaaagctgctcacaggagtaggggtttgttctggctcacagttccagtccatcatgccagggaagtcacagtgccagcagcttgagagagccggtcatgttacagccacaatcaagagcagggatcagtaaattaatgcaggcaggataaggctcaacttgcctttccaatttacaaggtcccagaatctcctgctcagggagtgatcctgcccagaatgggcgggtcttcctgtcttgattagatccctcacagacatcctcagaggataacattcagctagacaatcccgcacaggtatgcctagaacctgcttcttgggtgttgagttgacagtgaatattaaccatgacagacaccaaagacaaaatcgtatctatgaccctagagttcaggaaagaactgcaaagcaaaatattctgggagttacaagcgttttggtaatatttttaatgtcataaccacaccatcaacaatcaacttctgtcctggccagtgggtggagacgagaagtgcgttcttcattggtgttgatacagaagggggtgagctggaagctatttgtgcagggtgagtatgtatctaggcaaaggcaaatagcctacaaacagaaccttggcctatgacccacttattttgtgagcactgagttcaaatcaggactaaatgcctcaaaattttgagccacaaagaaatgccagagttgataagtcctacaaaaataatttattgtccatcgcatgcatgcatataattcataagcgtttcaagaaaactgaaaacatattttaatgtatgaaaattggcagaacaatagatagtaggggaaataatattctatattttgtggcatctggaaataagaacaagaagacttaagcaaacccaccccacataaatttgaaaaaaaaaaaaacatttgaaggaagtcagttctaatttgttctatgtttttactttacagtcaaagcagttcatttttcgttttgtcttggaattggttcccttatataacacatgtcaagtagctggggagatgtggttaactattgccagcaaaaattcctgtcccacaagaacactcccttctggccccttcgtttcttttcattctttggacaccgtgtgctagtgttcagagcacaggccacagaacagctccaaggagagggcacgtccagggctggttctccaactctgaagcccctattaatttactgagtcctgactgagtccctcaggacccacggtgtgagtattgaagactgctcacaccgggtacagtcaccagggaattgatcctaagttgagttccctgaagaacacaatcttgctaaataaagtgtgatgaagggaaatataaaccaaaatgttctcgtagactcaggtaaaactaattgctccaatttgattatcacacacacacacacacacacacacacacacacacacacacacacacacacacacagatggcattccaaagcttgctttaactaggtgttggggcaagcccatagtcccagcactcaggaagctaaggcaagagggtcacgagtccaggagtttgtggccaactcctaaatggaaagaaaaagaaaaacttcccttaaagagaaagttttaagcagtggtggttcatgcctttagacgcagcacttgagaggctgaggcaggcagagctctgtgagttcaaggtctccatagagagttccaggacagccagagctgtcatgaaagaaagaaagaaagaaagaaagaaagaaagaaagaaagaaagaaagaaagaaagaaagaaagagaaagagagggagatagagaaaggaaggaaggaaggaggggaaagaaaaaagaaagtttaaattaaataaacatacaaatacctatttcttatcctatttccatcaaatgttctgttttaggcaccttacaatctctcaattttccagtaaaatctttgctatgagactcacagacttggccacaataagaaaaattgataattgcatatgtctgaaaattccttagtgaaaactgtcactgggtttagtgactttaagtattaacaagaaagaagaaagttagaactcttttgaaagacaagcccacccctaccctttaaaaaaaagaaagaaagaaacctggatctcttatataccaggccagcctcaaactggctaagtaaatcaggttggtcttgaccttctgatcgaccttcctctatcccaagatggatggcaaagacatgagagttccccagaagctcaggcgccagctagcctgtagtatgcaacttcatagcagacaataaaagagactgtgcctcaaaagcaatatggaaggtgaggactaccatccaaagttgccctgtgatctccacgagtgtgctgtgcaggcatacaccctcacagacaagcacatacacaaaactaaccaactaaataaataaataattaagagaaagagagagagagagagagagagagagagagagagagagagagagagagagagtttgagattcaaaacatcagcaaatgcagttcagtgggcaagcatgaactgggcaagtgcaagacatgggccttgaagttctataaacaacagtagtaaacaatgcctaccacctacacagcatcatacctacacttcacaaagcaaacctgagtgcaggggtcaggggaggcaagtgctcttatgaaggctacaggagtctgtctctcttctaggaggtgatgacaaatgtggaattgggggcttggagcatgatgaagccatgtcttaccaggcaagcaagttataatttttttaaaagaaaattcaaaggaacaagacaagaagactcaaaaaacaaacaaacaaaaaacagccaacaaaaacgccaagatacaccactggcattggtggcacacgcctttaatcccagcactcgggagacagaggcaggcggatctctgtgagttcgaggccagcctggtctacagagcgagtgccaggataggctccaaagctacacagagaaaccctgtctcgaaaaacaaaaaacaaaacaaacaaaaacaaaacaaaacaaaacaaaaaaacgccaagaaactctagaactatgatatctaatgtgataggtgataggcatatatgtgactttttaaatatagatccattaaaattgcatgataccaattgttcatttcttcagactcatgcaataatcacatgcagctgctgtaatacattgggttacatgagtgtaaaacattttcattgttacatgaagcccagaaccacagaaatgtgagggtggagccaggaaggcacagcttgaaaggagtccccaagctaagtggcatgctgctgtgcctggctctgtaggctttccgtggccacaagttacccagaatccaaaagacattccattaatttaataagtatataatgggcctctactaatacaaggttaggaaatatgagaagtgagacacagaataaaacaggttccaaccttgaagagcctgataacagaaaggaaaatatgacccacatgaatcatctttctgttactaagacaaataactgagacaatcaactataaagagcaaaggtagatttgggctcacagtgttgaagctttctgcccgagactgaatggccccattgcttccagggcctgtggtgaagcacatggcttgggtgtgtaacagaacagaatcacttaccacatagtgagccagggaacaaagagaaagaggaaaaagacttcatagtagggcctcctctaaaagattccaccacaccccaaaaagcaccattctagtcatgaaaccattaacacacaggcctttgggagacgcagtgcctgagcacaataaccacggtgcacagtggagagggacaacttccaaagaggagcactgagaaccacacaggaggcctaggaaggggcccgtcacagaagatgcaagaaaatctcttagatggacattttgtttggtttggttttttagagacagggtttctctgtgtagctttggagcctgtcctggaactcgctctgtagaccaggctggcctcaaacgcacagagatccgcctgcctctgcctccccaatgctgggattaaaggcgtgtgctaccgacgcccgcctttccgatggacatattgtaagctaccccttgaggaaggtagttggggtatggtgggaagatcccaagggtccagagatcatctctaattcaattctgtcccctgtgagtagtagtcttagcttcagtcctcaggtttttagttgggaagaagagctttgggagcaataaatactaagatggagagacctttaaaagcaaaggcaccatgatggatgcacatacgggaaatgggatggcgtgtaagcttggagcccagtcatggcacagctctcttaggacttgtacctgggcatcatatcaatcctaaaacaagccaaaaatattatgcaatgaagtcatccttgaaaaaaaaacaaaaactaaaacaaaaaaaacgaaagctagattttgacagtgccttgatagtttgggtcaaatataagaagcacactttaaatgttaacttgtcatgactcaccattacctaggaagagagtctctgataaggaagcagatcacgttggcttgtaggtatgtctgtgggagaccaatttgatggttagttgacgtgggaggatctaggccattctgggcagcattgcctcagggtttgggttttggactgtgtaagaatggagaaaagctggctgagcacagagagggagagcagaccgcatgcatgggtgtgttcattttgtgctgctgtagcctgtggatgtaatgtgaccagctgctttgactttctgatggacagtgactcagaactgtaagctaaaataaagccctctcttccctaaggtgctttttgtttgggtatgttatcacagaaacaaaagtaaaactagaatacacagcaggggggggaagaaccactctatttttgtttaaatatgatttttaagtagcactgaagaataatatcactaatttccccctctttgggaacaggcgccatttgtgaaaaacatgagcaggagaacattctagaacacaatcaaggaagctatgggacatttctgaggggggaagggaagcaagtcagagtctgaaggtgaaggacataccactaaactgttaagctgaaatggaaagagtgaagccagaaccacagaggtgagactacagtgcaatcagatgtggaacgcatgctgtcccttgctaagaagcagacagaaaatagtgcataagtgaaataccagctagcaggcttgcagatctctatctctgattgaatatgaatatacatagagaagaaatatttgcaatctgcagctgtaccaaagatctgtcagtagtcacactaatatttctcctatatgtatttttataaccacactgaaatatttgtttaagtgcaaatatgtgcttggtgtgtccaaatatagcaaagtatttgcctaacgattagagttaagacttcctaggatttttttcctgaccccacaggtcactgctggctattagcaccttttccagtcactcttgcttctaaaatgttgaaaatgagatccagtgtgtgagcccggagaagagatgctgctgttttaaatagagtcatgggggagtcacttcccatccaagatctttaaaatagcctatgtgctattccctccaaggtgagtacaagatgccttaaagataaatgggaattgcatatatccatatttgtgcctgtcccttttttttaaaagattttatttatttattatgtatacaacattctgcttccatgtatatctgcacaccagaagagggcacccaatctcataatggatggttgtgagctactatgtggttgctgggaattgaactcaggacctctggaagagcagtcggcactcttaacctctgcgccatctctccagccctgtgcctgtcccttaaattcaaccatgcactttctccaggtgagctatcatgacaggtggctgtcctcactctgagagactaacacaaatggttaggcaccacactccaggaagtacaatgaacaaatccctgactcaatttcagactccctactgcttcatttttctacagctcaaggaccaggagacagaagccaacatctagccagacaagatttgtcttgtggtggttctagagacgggacctcatcaagaaccctgcactgtgcctcgtccccagccctgagatgttgactcctaactgtggtatttcagcttaaattgattctgactagatgctactggctaggggtgtgccccagtgtcagagaacttgcctcgaatgcataacattccaaagctgatccccagcactccagtaagtcaaaacaatgacaaaagaactctcatatgttgggcaagactgtcaactcacattttaaagagaagcgtttattaatctgggcacagtggtgcatgcctctaatctgagtactcagggtacagagcagaggcagaaggatcaggagttcaagaccgtccttggttacaccgttagttaaagaccagcctggactatgtgagaacctgtctcaaaaagaaagaaagaaaaccatttgtgttttctagttttttgtattggttggaaagctgcaagtactcaaggtgtcctagcatcctttccattgtgtcctagcatcctttccaaggtaccctggttcccgaccgtatatacgctgacaaccttcatggttcctgatgtccacttgaatccctttatgctgtttcattttcaccagacttgttaaaaattctgtattcatgttaggtatttttcccagatagaattggttaaattagggtccagtcaaactggaatatggtgggcccctagtctaacatgtccagtgtcctctcgagaaaaggtaggtgtttgcaagatgtctcgcaggtaaagctgcttgctgacaacttgagttcatccctggggtccacatgataggagagaactgactcccgaaagttgtcctctgacctccacagtgggttgtgtcgtgcatatgagcaggcgtgtgcacacccgatgtaaataaagacatgtaataaaatatttaaaacacagtggcagcacatttactagaatgtgccaggcccacggttcacccaatcacagaagaaagaaagaaagcaggaggagggaggagagacacagacgtaagaggatgtaaggacacagagagagaagaccacgacaaggcagagttggaatgatggagctacatatagttctaacaggtcttcataataaaaacccagagtcagatattagggagagaaagctgaaggatcagagaagcagagcagccagtcactagagttcttacagctatgaaatcctcagactgaggagattgagctcctgtctcctcctgcctaatcatttcctgtctgtctgtacagacctccagacctctatggttacctagtggctagctctgccctctcatcttcaggcaagctttatttgtacaaacacgatatcaccacagctacaagacaagggctttctgcaactatgaagttccacaagccgtgagaggggcatggagtatttctttcccaagctcctggtaaggacacatgacccagaagacaccttgatttcaaactctggcctctagaactatgaaacaataaatgtctgttgtattaagccctccacctgtggtatttcattatggcagcccttggaaactaacaggttttattctccattctttagatttgttgtttccccatcgtcttcctgaaagaacttgtttccaaccttgttttcttaacaacacaattaaggcatactgttatgataaatctttctgccaaaagccgctgagccccaccgccacgtgtaagcttttcgccagccgcccacctgagttagggcccaaatgaatacacagaaatttgtattaggttcaatgctgcttggccaatgactaggattctcatctgttagctcagtctcaattatcatacatctatatattttataagacttatcttatcggacaccttattcacatcctgccactggaggaggcaaaggggggaaaaggggcccttcctgtttctcctttgcttaaatatgagtctccttgctatgtcacttcctgcctggatcatcacttctctactacatttctcagaatcctctttaacttctagtcctgtctaacttgctgtctcattggccaaacagtattttatttaacaatcaataagataaacatacacagaagtacatcccccatcagcatacactttagattctttgtctctcatttcataatttttaaaaatgtattcctctctgtttctctgtgtgtgtgtgcatgtgtgtgtgcacgtgtgtgtatgtgtgtgtgtacgtgtgtgtgcatgtgtatgtgtgcatgtgtgtgtcatatgtttgtgcatgtgtttgtgcatgtgtgcgcgcatgtgtgtgtgtgcgcgcgcgcgcgcacgcgcgcgtgtgtgcacacgtgtgtgctttgtgtgtgctgtgtacctgcacatgtgtgcatgtgtgtgtgcgtgtacacatgtacatgatggggagcattggcatgtgccaccttatagttgaggaggtcagaggacaactttgtggagttgcttctcttctttcatctttatatgggttctaggacttgaacctaggtctccaagtttgtgtggcaaagtgcctttactttccgagacaccttgctggcacctatctttcatttctaagtatttttacttataaatgtttgagaaattgccactgtgacttctcccttgcctccccagtacaagggttgtgggcatacaccaccgtgtcctacttccttttaaacggtttgctttttgttgggtttgctttctgtcttcagtacagaacctggcataagcactaggcgggcactctacctctgtgctgttctctcagcccccacagtttccattttcatcttgaatacctgggtgagaatttcaagattcaaagtgtgtgacaatttaaattatatccttagtattgatttctaaatcaattgaattatggacacattttgtttgtatgataccaatttttaaaaacaaatttttgcagagtgacttacatacaaaatattatattataaaattctagatatacttgaaaacaaagaactatattttctttgcaagtttggagtattgtatgtattcaagatgtaaattagatcagacctttaaatattaccttccaatcttcttggtagtcacttttattttattcattttgcttgacctatttttgaaaatgcctttaattggcccattcaattgaataattatctttaaaggtgtgtaatttcaggttatcagttattttcccttggcactgtaaaagacatatttcattgtcttctggtatcagattttgccaaggggatgtcaacagtcagtcaaaatctcattcctcttccctataatggctgttatgtcttctctttatccttaatgctgtatatttccactgagatgtgtaggtttatagtatttattctacctggagttctgcatgagatcttgtgtgtgagtgtgtgtgtgtgtgggtgtgtgtgtgtgtgcatgtgtgtatgtgtgcgtgtgtgtgtatgtgtgtgtgtttgtgtgtgagtgtgtgtgtgtgtgtgtgtgtgtgtgtgtgtgtgtgtgtgtgtgtatgtagtgcctgtgcacacatgtacatgagttcctgcacccaaatgctgatggaagatgttgggtgtcctgttccctctctctcagccttatccccctgagacagtctctcaccaaaactagagctaggttgacatccagcaggcctgtctctaccccatagtgctgggttatagccacacatgtggtcacatgtggctttttacatgggtgctaaggattcgaactcatgttcttatacttgagcaacacactcctacccaccaagctgtctcaccagccctcattccttttttaaaaaaattagattcatttattttcatttattttattttatatgtctgagtgtgtagcatgagttctaataggtcggagagaggaatataggtgataggagacaggagctctgtctcttttcagtctgaggattttgtagaggtaagagctctgcttctctggtctttcaagcaaactttgttagaatatgaacaagatgttactacatgagtgtctgccaccatatgcatgtctagtgtctttggaggtcagaagcgggcatcagttcccatggaactgggcttatggataattatatggtgtgtcccatgtggttgctgggaactgaacccaggccctctgcaagagcaacacatgctcttaactgctaaaccgtttctctggtccctcaattttcagttataaaaaaaaatccactatgatctctatagatattgcttctctgcaattcccctcattcccatctccgaaactcctagtgaacgcatgtcacagcctactaatgaccctacagccccttcattgtttctctttgtctctctgccctgtttccatggtgaaagtctcaacattatcatcaattttccaattttctcttgaaactattttcagtctatagcttatattagctactggatttttattttaatgattatgcatttcagttctaagatttctaattcttttcataatctagtctggtttcattgaattttttcccataatactttgctttgcttaatggaagttattctttcatgcctcttccccaatctctgtgcatgtgcacacgtgtgtctgtctgtgtctgtgtgtctgtgcatgtgtgtgtatgtgtgggtgggtgtctgcctacctgtctgtgggtgtgtctgtgtgtctgagacaagtccttgctacacaggcctgtctggcctgaaactcactgtttagagcagagcaggctgaccttgaacttgtgaccctcctgcctctgtttcctgagagctgcgactatagattatagtcaggagccagcactcatggcagctccttcatgtctcatgaacattttcagcatatgtagacctcttctcagggtattccataaaatcaattctaacaggagtgttgtggtttgggtaaaaatggtccccataggctaatatatctgaatgttaactgacctggaagtggaagtatttgaaaggattatgaggactatgcagccttgttggagtaggtgtggctttgttggaggaagtgtgtcactgggggtaggctttaaggtttcaaaaacccatgccaggtccagctctctctctctctctctctctctctctctctctctctctctctctctatctctatctctatctctgcctgtagatcagatcagaactagctctcagctagttcattaaaataaaaatcatgagtactgccagagaaactagtaaacaaggaggaccctaaaagagacaaacattgtcccctggagaacgggaaagggtcaccatcccctgagcaaattgagagcatgggaagaggggggagggagctatgagaatgagaaggggagaggaggaagaatgcagaggtcatgagggagcagaaaggttgagtcaggtgtagattagaagaaaggacatgtgacaggtagggttttagttggggggggtggtaggggaggaagggagggagaggggaactgggattgtcatgtaaaacaatcttgtttctaattcaaattaaaaaaaaaaagattaaaaaaaaaatcatgagtgctgccttgctcccatcatgctccctgccatggtaatggactaacccctctgaaagtataagcaagccccagttaaatgcttctttttatatgagttgccttggtcatggtgtctcttcacagcaatagaacaatgactaagacaaggcataaatgcatgttgttatatttttgttgttgtcttaactttgaatttggttgagatgctcacttggaaactaggcttgaatattttttctatctatctatctatcttcctccctccctctcttcctcccaccctccctctccccctccctcatctaacaccctcagacttccccctctgtgtacagtggttttagagattgccttcattccacacttggctgtaggaagcatccattcagactccaacctactaatgatgcttccaaagccccaaccccagtgacactgaagacaatacaaattgggccagctgcccttcctgctggtcacaggttagctggtcctccctgtccattaagtccatggttggctaatgcagcagccctgggcagtgagaactctctttcagccccctttcatgagcaagaaaggcctgcctttcctgtggcttcaggcagtgagtttggcttcagtcttcatctgggcaaggagcgctttgattttcatttacttgggacgagccaaactccagttaatattgcctgattccagccccagaatcccataagcttgtggcttccgctcagctcacagcttggtgtttctgttccagatttgaactacgggagtgtttatttaaattttaatcttgataaacttcatcattgctgcatgtttggagtaaagatgtgtcaaagaacaaattttcagcgctgcctggattcccttagcagatggaggtgtctgcaatgcccccagttttatccttagcccccctttagatgacagaacaatctgaaatattatttcataaacaagcagttctttaataagcacatgattactgtttaatcaagaacaacggttctccagctgggagtacagctcagtggtagaatgcttgcctaggatgtgggaggccctggattccatccccaacactgagaagaagaaaaagcaatagttctttaaatgattttgcctttcatctgcttatctaattagcttactaaatcacctaattcagttattaatggtattgaaaatattaaacattttaccttccagctaatcttcatagaatagctttttttttttttcttaagaaaaatactgaggaaaatctcttcgtcctgagttctggaatttcctaatgattatttttttaccatgtaaacaaggccaggagtaaatgaaatgtggtttattgcttatacttcctggaatttctgcagccattgcagaattacagcatccaaagttgggagacattcttcccatgaccacactgaatcttttcttcccccgttggtctgcatcagatttgtgaaggttagtcactaatgggctaagactgcagggaattctgtggcaaaggtagaagcccacttcaaagaaagcttagacacccagctggcccctctgaagagaactcatgcccatggaaaatctttagtaactttctgatggaacctgatagagcaaaaaaccagtcctcctcccacccacccccatcacaaatggagctgtgatgcacatgacacagtgggcatgaccaacaaacagctgtcaggaagaaagggagctggacgggtggctcagaggtcaagaacatgtgatgcttttgcagaggacccgggttctgttcccagcacccacactgtgactcacaactgtcttaacgccagctccagtggatctaacaccctcttctgaccactcagctatcaggtatcacacatacacacatacatgcagatgagatattcatacgctaaataaacccaaaaccaaatttttaaaagaaaaaaaaaaaacaacaaaaacttgtagaagtgtctgccaggttccatgatgcaaatactcccaccatggctgaattcaagcagtcaacttgccattcctgtttacagaattgggaagagttgcccacagttgttctctgggctggtgagagtcagtttcaacatgtaaaatggctacaataccaaatgcaattctctccaggcctcctcttaacctctcagaggtatgtagtgtagtggtttgcactgctgagaaaccttcccagtctccatgtcaccatgctgtcctcttttatcctaggcttgggctgatgtaaaaccaggtctttctccttatctctgcctccatcatgtgcctccaaagagacacttcaccctctctccggagcccatttttcttcctccctacactttgcattgtatgatctcacccagtcttgtggcctcaaatactgtcaagaactgttaacaaatacatatttatctgcattccagaccctttttctgagttccaagctgatgtaagccaactggctgctcaaatatctccacaactcacatttaaatcatctgaagcagaaatcttgactctactcctcccatcttctttgtctaaacagagttcccttcccgctgttgatttgctaaagtcccggacctatcaggggtctttttgcaaagttctcctcccataatagtcagcgactacaaaatactattgattccactttcaaaatatttctcaacgctctctgtacctgtccatcaccctcatcgctaccgccattgagttcccaagccccatcccaacctcttctgccctccttcctaggcttcccccaccaccatcatcaatgactagagagacttcagagaacatgcttaagccttccctagcttcttactgcagtcattcagtcattcattcattcattcatattgatagtctggaacccagagtctcacacatactaagcaagcactctaccactgggctacactccagcctccattgcatttcattcaaaaattaagtaccattctgtggccttcaagcatgtacccacatgattagagttctctctctctctctctctctctctctctctctctctctctctctctctctctcattttatagaccaggctggccttaaactctcagagttccacctgtctctgcctcccaaatgctgggattaaaggtgtgcaccaccaatctggtttacttttaatttttttagctccacctcctgtcatttttctgcccacagtactccagtcacttgaagtgtttcaggtgttaactcataaagtttcttgtctctcacccttcagttctacactgaaatgctacctcttcctcatagcttctatctaaaacccatcatcctggggctagagagatgggtcatcccttaagagcactggccactcctgtataggaactgggttccattcccagcacactggactcctcacaactatctgttaactacaatttcagggactctcgggacctcttcaggcctcttcaagaactgcgcattcatgatacacatacctttttgctgacaaaataatcatacacacaaaattaaaattaaaattaaataaatcttaaaaaggacaccctcgggctggagagatggctcagaggttaagagcactggctgctcttccagaggtcctgagttcaattcccagcaaccacatggtggctcacaaccatccataatgagatctggtgccctcttctgacctgcagggatatatgcagacagaatactgtatacataataaataaataaataaataaatctaaaaaaaaggacaccctcaccattctgccaccaacttttttttttttttttggtcttagctcttgggtttggttttttgttgttattgttgttgttgagatcaaaatctggtcatttctcatggtttccaatagtgtaaatggaaattcatttcctccacagggctccatatgacttgcagtcctaagcattgaacagtttgttcatttcgtgtctatattccccgagtcagctgtaagcactgtgggtgtcagggctgtgtctggtaagcttattgaaagtcaaggtcacagtgagtgctcagtgcatgtgtgttaaatggtaaaatgaataaataaataaataaataaataaataaataaataaataaagtgaatagagcatcagggttaggtgaacatgaataaagttagagtagttactggcattgaagcttttaggatactgtcatggggggcaggaggtaacaattatagttcatttgatgatgggactcttataataatatgaagttggcttgtttgtccctagaaagcaaaccaagggaaagaaaagattcgccaagtatgacatcaaatagaacaaatgatcaagaagtgctaccacaacgcagacataattcattaagtaggaccccaaagtccctaataattatgcttaacagtaggtaaagagacagttttaatacgattttatgaggtcaacagacacagtataagatgagtgtgcaagccattgttaacttagacaaatgcacagatgcaagaaactatagatagcatacagtgctgctctgtcattcctgctcctttgaccacggctcagtatgtcctcggatcatcttctgagttgtacgatgtcccatatcccacactctcattgcttttgctcattacagagaatgctcattcccgggtccttctggataatcctcctcccactgaagcacagagaactgcattactcacaggtcctgtgatgaggacctcggtatttgcttctttcctgggaatacctttcctggtttagcttcctctttattgtacagtgccaagatagactctccagttttgttaaaaaaagaatgccttctgttttccatgggtaatcatcgctgattttctaagtatgtgacatacgagctatgatgtgggatagaccttatagtgcattttgtatctgttgttcactggcatgaatgggattagggtgaatagcacttccctgcttatctggattaggatatgttgtaaattagaataagttgtggtaagacaatttttagttctaactctgctccaacgaatgttaatgatttcattaaagtatcccacttctggcccctgtgcccagggaggacccctcaggtgaaagcacaccccatgcctgtgctcaccacacacctttgggcttcaaagtcttagaaaactttggtttcgtggaccaggtttgcagagtttgggaggatgacatgaaaattccaagtttctaatccagactcttcatccaaactgctgggtggccctccatggatcatgtccagccattcctccacgttggcctattgcaaggggagagcagtgcatcaaaggaagccaatctgaaatctcacaatccagtcactgtttctgtcctacagcaagaagagactcaaagcatatatgcagtcatagcagagccttgctttttataaagaaagggaacactattgaatttaacattcacacattccaagccatggtcttccaagcttttcttcccagccaaacctgaaggcaggagccaggatttaaaaaaaaaaaaaaaaatccagaaagcagattttggcataggttatctttaaaacctgcagagaatgagtttcaagtcttttttattttgttttgttttttattgttttagggaatatgttcattccttctgtcatataatgtcacaggctatgcctgttttttttttttttttttccgttttcaggtcagatgttaggaacagttctacctcttgagagtctgtttctttcttaactgaaaattctttgttggagctgaagtctgactctattttaagagacttgatcttctgatgtgatcattaaatcactcaaagaagggggtgcagaacaattctgactgcttggagaaaagttaacacatgccaagtggcaggcaaaaagggttttgattttaattaccacccctggacaaatagcccatgaggttgaagctctaccacccagagacaccagcagccctgctctgttgggacttttataaaccaaaaacaaacaaacaaacaaacaaacaaaaagccgctgtgagtgctctagtttgataaggatgtccaagaaaattgccttcctcctcctcacaaagcaacaatgtgtcattacagcaagatggaagcttgtgcattccggtgtgatttccccatgaggctgcaagcctgaaagtgtaacagtgaggtaaggggctgagtcaaggggccagaatccctttagggagccaagcctcattctgaaatgggtattactttgggcttctcagtgttagtctgtgggagttgtggaatcaatgggaactctgtctgcccaagagttctaagtcctggcaaataggaaccaaccagtttgcctggtagccaaaggagctgcctatgttttaaaggttaggagttcaaatcccgtgggcttgctcctgaatttaagtacacgcactacacatcaggcttactgacaactaagtcctaactacgactaactaaacaaatgctgtctatggaattctttacctcgaagtttctggacaaaagggctcacattccagaaggcatgggcctcacaactccttaagtttccaacagcacagaactgctccttttatttattgtattttatttgtgaggggggagctggtgatcaaatccaggacctcacatatcctaggcaagcattgctccaatgagccacacccctaccttagaatcacacctagcacaaacaaaaaacaaacaaacaacaaaaaaaaccaaacaaacaaacaaataaaacccaagttcctatttgtattccagattctgccatggatcctactttgtggagctgtgttttcaatgcccccactgtcttggaaagaaagacaagaaaggactgtagactcaacagtgcatactgctgaagttcattaagttatcttgtactcaagtccttcctatacatccacagatggaggaaaataatgagccctctgtgccctctggctctgaggacgcctgaagttagaaatatcccagcactgagacctggagttgccgctacaggaagtcctgtcttttaaattaaggctccagccatttccttcccactgactcttattgccaatggggctttgtggacagatcacacccgggaaagttttcactatctatgtgagatgaagacaatagtgatgcctgctccttacctacccgactaaattgaagggcaaagcaatacgatcacatctatcgtgtgctctggatgcacagaaaggcagggcttaggagcgagggtgtaattatattgagtcaccaatggtatcattgcctgtagtttacatatgtggctgttgcctaagatactgctgaatatgtggctgtcatgtttgatgttttaaggacatggcaatgctacaaaaatgagcagaagagcctacgttgagaatgggaaatatctttttcttttaaactcctatacaaccaaaatttattttaggctccagcttgtcttacaattagtaacacaccctagcttcacaaagcccttcttccatttccttgtcaggcgatgcctcctagagttgggtcggaatgccatgtggggaaaggtgctcacagaaggaagaaaggtgtcttcagagcaacattcaaaatcaggacacccaaatggccatgacttctacagccacgatgctagacaacctcagtctgtaaaatctgtgccccagagcactgtcctggcccatgtctaagggagctgagccaggccaccctctgctaacccaccattggaatcagcttaaaagaattctcaaacttaaaaaccacagtgcataaccaaattgatcatcttttggtatgtcaggaactctatgagtgctgaggccatgagcactaaaatgctgtttccagagccagggacatggttcagttggtaaagtgtctgcagcacaagcatgaagacccagattcaaatccccaacacacacgtgtaaagcaggagtgtagtggcttgcacaaacctgagcagagacaagaggatccctggggctcgatgaccttaacttaactgaatcagggagctctgggttcagggggaggccctatctcaaagtgtgtgtgtgtgtgtgtgtgtgtgtgtgtgtgtgtgtgtgtgtgtgtggtagagagctagggagatggaacataagatgaaggtgcctgtccccaagagatcagtttaatctctaggatccctgtggcagaaagagagaaaattaacttctgtaagttgtcctctgacctccatacaatcatagcatatatgcccaccccccactcccatgcatgagtaaataaatgtaatttttaaaaatgacaggcataggcgaaaatatggtcccctacagcaagggtgaagatttcccaggcttttgtctgatttcattcacctttaaaaataataaaggtcaccactcactacaggtcccatctcactgtgtgaaggtctatgtcgtcacagcgtgtgctggcctagagttgaggactaaacaacacaacagaaaaatcctcctgcctcagcctctggaggactgcaggagggaagcctgctttggctgcatagtgagatccagtctcaaaaacacaaggagggagggagggaggaacagcttgcttagggtctctttgcttcctgtcacgggacataatctttgcaaatctttgcatttcatcaccgtcattctcttggcacagccatgaccaacctctgtgtcagtttcctatagctgttgtaacaaacagttaaaaacaagtttatcccctcaggtgttcaaagatctgaaccacttttgcttcactaggccaagatcatggtaccagcaggcagcacccttggcctctttacagctccccataccatggctgccctcagtctgtagccacattcatacaatgtttccctggtcattttgtcttgccatcttctgtttgagtcacacgaccctctaggccagtggttctcaaccttcctaatgctgtgacccttttacacttcctcatgttgcggcgaccacccccccacaaccataaaattattttcgttgctacttcataactgtgattttattactcctatgcataatgtaactatctggtaaccaggagatctgatacgcgacccccaccatgggtctccacccacaagctgagaaccactgctctagatgaatggaactgaattaagggacttggactgcagaaggtaaacttctcatcctgaaatctgaacctttgcttgagaatatatgccctttactcatgggcttgtcgcatcaaaggttcgatgacactaaaaattgtagtctactttacctaccatgcagaaaagtcacccccacacacacattgtttccaggcttcgtgtctcagtcccttcagagatttccttacaaagagactaagttcaggagagacaccacacagctcagctcaacctttggggaatcagtaggctcctattccaggagatcccctgagtccttagtggtttttcagttataacctgggcactctgtcacagtagtcattaaacctggcctattcaatgaaattcagctacagtggggattcaggcccaggtggctggcctcctgcacacagccacgccacagtgcagaaccttctgccgtgcttagaccccatcttctgcttttaacatgtgttcctagaaaaaaaattattataatccttagagttcataaagtcagagtcccaatgatctcaaattatacctcccccgaggtaaacagatcccaatccagttcaaaacaatgggatttttctcctgctgtaatagcaacttcaagttccacacctaagattccactctcaagtggccaacccactagctccccgtggctcagactagatttgcatctatattaggcagctaagattccagccagggccacagcaataccaagtttgtccttgaacttcatttttttggtctctggactccacctcagtgtttggacatttacaagcaaaagatgtgttcccaaagaaggaagtcaataaaaagatccatgtttacattttccacgcctttcccattccctgaacttacaggcccttctctggggcagtatcaatctattcaatctatttatttggcttctctaaactgtgcattcattaaaggaagaaaaaatattctccaaacactccttcgtttcccccccccccagccgtcggtatggctaacatactgaccttctagttgttctgaacaaaaaaaaaacccaattcttagtttataattcagtctgacttcattaagcaaggtcagttcttccaaagaccacattttcaaccacatgaaaatgaggtcttttccacacaaggaatggagttgaagagaagccacaccgtgggtcgcttttcagaggaggttcactgctgaacacagttgtcggctttgggacctgcctttccgagctcctgtgtaactgaacatgatgaagtcacatcctggtgagtccaacgccaacgcaagcactgctaagagtaaccgtaacggagtaaacggagtaaacagacatgcgtaacctgcagcagtcaaggacagtgtgggtgagggccgacgcgtattcatacaggcattcgtttcttccggtcttaagcatgctcagtccaccgtcatgaaaattagagtgatgggtaagaacgcatctgggcatgctcagattgcacattggagtttagggaaaggctactttgtaggtgctttaacacaggagtatgccttgtggctgctcttaagtgatagctaaactgcaggtcccaccaaatcatatatatatgcatgtgaatgtatgtatatgtatatgtatatcctacatagacttacaatagtttgttatatataatatatcatatatagactatatatacttatgataaagtttgttaggttcagaaataaatagcaataatatctaatactgaaacagattataatgaggtatcataataaagtttacgtagaatataggaactgtttatttctaggattttccattttttatttttggattgtggttgaccacaagtaactgggaggctgctgcacataaatatgtacactggtcactcttagccacccaggctttaaatgtctctctttttggcaaggaagacccgggaaaggagaggcagggctgcactgccctttcccactgaagactcacatggctgctaccaagaatttcaactcacattaggccgtggtagctcacgcctttaatcccagcactcaggagccagaggctggaggatctctgtgagttcgaggccagcctggtctacagagagagttccaggacagccaaggttacagagagaaaccctgtctttaaaatccaaataataatatgattatgataattccaactgatacgcccagaatgggaccctggaagcaagcctcctttgctgttaccccagactttcgaggacaggccgcagggcctgcagctcagagaccaacatcacaaattccgcctgagagaactgagaatacattgcagctgatgtctgtgattgccttgtcttgggaaatgttgctgtgtaacgggtctgctcttctttaagtagcaaatccaattacttactagacactgttctcacagacgaaagacgattagcataatgtgatccagtagagtcacttgagtgcctccctgaaacaaaatgatagttttttaaaagacacaaacaaggataaatgagaaaaacaaatgaagaaagcagtatcaccaggaccaagagaagatcctcaagggaccaaaacacttccaggagaaattcctctctggcctgtactaggcagtttttcactgttaaaacaaatgcttgaaataatagatttttttagaaaagaaaaaattattttggtttagggtttcagatgcagttggctccagtgctttggggtcttcagcaaggtagcacacagcgacaggaacgaaggctgcagttaattactagaaagccaaagagtgaaaggggcgatgccagcatcccacaatccatatccccagtgaccccatttccttgcataatacatgtcttttgaaggttccacttcctcctgatggcaccagaaaccggggagtgagcctttaacaccttgttctttaaggggctgtgacgacctaaactgttgcaataccccatccctttcctaagcaatccgtctccaagtggaggagtctccttccgaatctgtcgccagccagggttaagtatgaaaacatggcttcttccaccaaggcaacaactctgaaaggcaaactgtaatttgaacatacatagaaaatggggaaaacagaaagtgggaaggacccctgaaatgggcggtgtctcctcaacaaatatctccttcatcacctctctaggttaaaacctagacgcaagactacacagtactcttcagactggtggttgccatttgtggaatacgctaagtggtaaggaaagtctgggaaataccagagttcaaaaatacattctaaaagacatgtagggcaagctccttttgcttcaggtgaaacttttatcatgcttttctctggtaaattgtcaggtgcctcccatgactgagctgccccaggaccctcagagacgcaacctgagaactccaaagctggaggtggcctgctgctcatctcctctaccccatcccaccccacacacacaccccagaaccctcacctccacccccgcatctaggatgggcaaacggagcctgaagcccacccgacatccagagcgtcgatgtgtttctctcctttctatttctgtgcagcgttcccatggcatccagccagagtgtccacaccagtaatgtctagaggatttatgaggccggccagcctttgggtttctacacagacctaaacaggaaatccacacaaggaaatgccctttctgtttgcaggccaaattcccaggatgccttcaccagagtgcctggctggaacaaaacaaaggcctggtacaacaaatgcccttcgatccaaaggctgaggtgccctatccgtctgccccttggcactccctccccaacccaaggggccttctgctcatttaagaagagcaaggttttcttttctcagccctcaatttaaccttgctctagttgctggatggggtcagtgaagagacacacatccctctgacctccagctaagtttcagggtgatccatttgacttatacagagtccattaacctgggcccagccctctggatccattagctggacacatatttcctgttctttcttcacattgcatttagcatggtgagggtgccgtaggattgaagaaaaatgttgatttagggtgggatttgactcagcagtagagtgctcaccgggcatatatgaagcctcaaggtctgtcccaggcaccataagaaaagtaaaagtggcagccggatgccaccaagtccctctgaggtagcactctatgtcatgacagacattcaaccttacccaatggcctcagttttgctgcaacttcaacacatagcatcctaacaaacctcttctccctactcagtcagtctgtctattctgaacccaaccaccccagccggttttcaaatcttctcagctgtccgagaaagattccaactttacagaggctgttactgagctggacaggaaggaagcttgtgtctctgtcccagaatagaactgtattgctggtgaccctctgcactcccctcaaggcatccccatggctgacctctgaaaatagactctatcctccttggttcactctcccccccctcccttgggaacgaagacacaagcttccaaggagccagcaacatcatcagggcttgactgtctttgagaaatcaccagatgtgggggaaggataacatgtcgtttcctttagtgaatgggtatctgtgcatttcctcctcagacagccccttaggagaagctgatgagagtgaaggacaagtcactctggcttctacttccactctaatggatcctggcagcctcctctaaaacctttcaagtcaacccctctgctgttggttgctttttcactcttttggctctttgggaggccccacccagctccccaattatcacaaagaaatctactctttcttatgaatgcctagccttagcctggcttgtttctagctagcttttcttatcttaaactatcctgtccacattttgcctctgggcttttatctttattctacatacatttctttactttttcctgtatagctgggtgactggcccttgcatcctcctctccttttccttctttttttctcaccccttcttctcttttcccccttctaattattctctccacctgccagccctgcctagctattggccgttcagctctttattagaccaatcaggtgttttcggcacacaaagtagcagagcttcacagagttaaataaatgcaacataaaagaatgcaacacatctttacatcattaaacaagcattccacagcataaacagatgtaacacaccttaaactaatattccacaacaaccctcactaagaattttatctctattgttttttatgatatgtatttgattttgggtgctggaaatgggttctttagaatgtcactcactagtaaactatatgtccaaccctaagaaggcatcttgccttctgtatttatgaacaagggtacagaagaagctgtgattcaatggagaattttggagacgggataaatacaagggaatgaactggtaagaaagcagtgttggaggatgtcttcaggtaatcaaaccagtttcgggtaatcaaactttcttctgtagcagtggctctccaaaatggaccaacaaggtgatatttcttggagtcttgcctcaccaacccagccctaccaggaagaggcccagaaatctcttgacaagctttctagcagactgaagtacttactcaagtttgaaaactactggtccagacagataaagcttaagagacacctctgaactaaaggagcaagagctgatgtgagatggttgtctgaagggggaaaatgtgtctggtaccttgcagagggaagaggaaggaatgctggctagattcgtgtcaacttgacacaagctagagacattcgagaggagggaacctcgattgagaaaatgcctccacacaattgggctgtagacaagcctgtagggcattttcttgattggtgattgatgggggagggccaacccattgtgagtggtgctgtccctgagctggtagtcttgggatttataagaaagcaggttgagcaagtcatgaggcgccagtcagtaagcagctcccctccatggcctctgcatcagctcccctccaggtttctgccctgtttgagatcctgtcctgactcccttcaaggatggtctatgatgtgaaagtgtaagccaaataagccctttcctctccaacttgatttttggtcatggtgttttgtttcagcaacagaaaccctaagatagcagggaaggaaataacccagcaaggaactctgacagagctggagatgtggctcaatggtacagcatttgcctagcatacacaaggccctaggttcaattcttcagaaacacacacacgcaccaggtagtggcagaaaagaattaaagacataattttatccatatctttgcccataccacactaatttacagcacttctaaaatatggtttaataatataagcatatttttcatttaatgtataatagggacccaattatataaatatatatttgtatcaatccatatatgagaagaaattaaatattgcacattgaggtgatggttgggcatggtgtgcacactgaggtgatggttgggtgtgtgtgcacattgaggtgatggttgggtgtgtgtgcacactgaggtggtggttgggtgtgtgtgcacactgaggtgatggttgggtgtgtgtgcacactgaggtggtggttgggtgtgtgtgcacactgaggtgatggttgggtgtgtgtgcacactgaggtggtggttgggtgtgtgtgcacactgaggtggtggttgggtgtgtgtgcacactgaggtgatggttgggtgtgtgtgcacattgaggtgatggttgggtgtgtgtgcacactgaggtgatggttgggtgtgtgtgcacattgaggttgggcgtggtggtgctcacttgtaatcccattacctgagaggtaaaggcaggaggttcaaggtcattctttgaactactggggttcaatggccatcctgagctacaagaccctagctcaaaaagcaaaaaccaagacttttataatgaccccagtcatcatgctaactcagataggggaaatttcacaaagtcccacctacccctacatgaagagctaaaggcagccagtggttgctcagagagggagactctccagtgacaagcctactggttgatcatccaatcccaagtgatcagccctatattttccttatatagcccaggctggccttaatatgtatatatgctgaaaggttcaggcattatgctggcctgcccctgttacctggtggaatccactcaggcaataccctggtcagcccaaggttccatgggaaagaagtctgcacgcaggtgcagaggacccctttaaaagataagtccctgcccctttacgctctctggtccctctctctgtttctctgtccctttctgttcctctgtccagcgctctgtgcgctctctctctctctctctctctctctctctctctctctctctctctatggcgaccggccatggcggtcagccatttacccctgttcctcttcttagtctccccattctgtcggccttataataaacttatagtcaatatgtctgtctcagcatttctcttttcttctttttaaacaaaacaataacatatgccataatagcaattataaccaaaaaagtcataagtttgaagggacatgagaaaaattggaggaagagtggttcagtactcacacgtgaaattctcaaaaaaaatatgacaattatagatttaaaaaagaaaatagataatgacacattttgtttccgttgttgagtgatgggctatggtcgatttttgtgaggagggagttgctgagaattgaagccaggaattgtgaattcgtgggcggggaggggggcagtatataagtgtatatacctgcctaatttttactttatctttatactttcctgtcgaccatacctttgtgctaattttataacgtaataaatgcaaaaaatttaataaggtgacaaacttgttaggtccaaatcgtcttttgaacaaatttgtatagcactctccgggctctgcttctccaaaaatttatgccacacagccatttagcccctcctcttgctcttgtgctcaaaggagtgtgcagaacattgggttcggaggaaagcagcgcagcagggagagctgcagaaaaatgtgagcctctgcccacccggggcacgtgcccaggctggggcggcacctcccaccgccatctggggtgcgggctgttctcaaagaaccgggaggtcaccagcagtcgcgccagagtgacttgctctaggacctggcagcctctggattttacactctgatttcctagcagggctaggcctcaggcaaacacaaaacaaaacaaaaacaccgacagagtcctcagatgcctaacaagaaaggacaatagtgtgatgtaagggtcgcccagcagccagtgactcagcgcttctgcaccatcaacaccagctgtagcctgggtgctgacggtggcctgggctgggcatggaaaaacaaaacggggacacacacaacacacacacacacacacacacacacacacacacacacacacacacaaacaaaacggggacacacacacacacacacacacacacacacacacacacacaccccaaacattgcctgaagaagaatggcaaagatactgacagttggaccatatcgggcactggaccttaattcttaagtcagtttcattaatatctttcctcaagatcccccaggagaggaacacttgacaggagagcccagttctccagactggaaccattatctgcctccaggctctatctcatgttaattctcctgactcttcatagtccttttcaaaataccgcagagtgaaatttggttagtgtggtagatgtcagtatagggttctcaaggctttgggaggaaattcccaccctttgtgagtcacaggagggcctgggagatttttgtacaggctacagaaaagagtgagaaactgtgccacgagtagtaaatgtctgcaaatgtgtgtcttattcaaagccggtgtccacagggctggccccactttcatgaaacccacttgagtttcatgactcaaggcaaggaatcctgcaggttgggctggtcctggcaggccatcagctacctcgaatcaccgaatccaccctttggtccagcaccacgaatggctgtgaaccaaacaagtgtatcctgtcacctactgtcgcctccagatctatctgtgagggaagttctttgctgtcatttgattaaaaactccaggcaagatagctcatcctgtaaaggtgcttgccttatgacccaagcttgactccccgagcccattgtagaaggtgagaaccaactttcaaaaactgtcctcttatctcacacacaatgtaatataataataataataataataataataataataataataataataatagtttaagaactccaggcctggagagatggttcggcagttaaaagtacttggcttttgtagaggaccaggcttcagttaccagcacccgcatggtggctcacaactgtctgtaactgtagttcggagagtctgttgccctcctctctcctccccagacagcaggaatgtgtgctatgatatgcagcaccagggggatcttgacagatgccatggccggaggacaaacatgcgggggacaaacatgccatcaggcagaacttacatgggaaggaagtttattgggaaaagaggggagtggggggagagagagagagacagagaagtgtcagagagagagagagagagagagagagacagagagagagagacagagaagtgtcagagagagagagagagagagacagaagtgtcagagagagagagagagagagagagacagagaagtgtcagagagagagagagagagagagagagagagaatagacagagcttgtctcttaaagggccctttgcatcggcttacagaaccagggtactgcttgccgtgtgtgccaggtccccaagaggcggggccgggtttgtttgcctggatggtaacatcgtgtgcatatggtacacacacatatacattcaggcaaaacacgcatgcgcattaaataaaaacaaatcttaaaaaaacaaaactccaaagacttcagaattttcttgctcactctgaggtatcagatcactgtatggacatttaatttatacatttgtacatacatgcatttttataatggttctagggctggagctcagagccttacggatgctactaggcaagactttactactgacctatatccccagtcgtgtatggacatttgcaatcacaaaatataggctcttttcataaattaggcattggggtcaagcatccctaatcgatgccatattcattcttagattagtcttccagcacttcccctgccagcctagaggaaaacagagctggaacacatacatgttatcgccccagcttccttcctagagctggaacacacacattatcgccccagcttgcttcccagactcctcttggagcacatgaagactgtctctcaacctctccatgccaggagggcttggctcgttgacccctgctctccgttgaagcccagtgctttcacaaaggcagtcagtcccatgacctcttcctctctctaccagctctctcccaaggctgtgcagctttctgggaagtccccccaaatgcggtcccagatcatgaatacaatggagataagcaaacgctacacattagagatctcttcccatcctccccacccaaagctaaagttatcagtgtttcaccaaatgctgttgtgcccacaataaatatgttagctatgtccatatctggtttctttgtgggccgtggctagaaagttaggctccctggtaaagccacaatgaagagtgcacgggagtcatgccctttttaccttggggaagtccctgccgtggctaccctggggatggttgaaaggaaattcagcagatttctcagagtcttgaggaagaaactattttttaggaaagtgatttctcagcagaagtggggaaggagcgagcctgtgttttagagatggacttagtgctcagaagggctgttccactctagggcctatagaagccttgactcccacttgccttttccagtgccccaaagcagggactgtatcctccagggcatacaaatctctagccctacaagtagtgggatgtctatgaccccagggtcaccccctggcctctgtgagagcctctgtgatggttacatccactttgtaagcaaaaagcagaaagggtctcagtagtcacctctgattctggacccatcctgaaagctagaagagccaggaggtcctttgctgtctgcccacgtgggcatgcaggcaaggtttttgcccatttgccttggcaactttcccactgtcatggaatgtaccagatgaggaggacaaggccaggattgatggggccccagctcagaacacagagagccaactcctgactgtgataatgacatggtccctgaaaaagtagcaaaacagtgaagcctgtgatcaaactgagacatcctttgtcaatgagctgatgaaagggtagttgacctgctgagctcctgatttgtcccagcaggtccaggtccctcaaggccctgtgagaggccgtcaccttggttcctaaggcaggaaaatgtttataaatcaaacccactctgttctctctatttcactgggtgccttttcttctcggactcattttcctttctgaaagtaggtctaattggatttgtttctatttctacagccccattagctttctaataccatcagagcctttcaattatgtgagaaattaaaccaaacgtgccattcttaaaaacctttaaatgtccatgcaaattcccttgacctagttttcttgtgtcctctagggacatagaatccctgaggaggacaccttgtgactcactgaagaaacaagataagaatgtcaaagggcaggtggctggaaactgaggagagagcagaggagagacattcctttccttcccacatcccaaatgtgaaaagttaccaagcaatagccctgctttttaaaagaagcatccatttgtgaaactattgatgtagggttggaaaattaaacacgagtgggggaagtgtatagtataagaattcaggatacgaaggggccctctcaagaggtggcaacacagtacacatttttagcaggggatggtaggtagtacaagactgtaattccaccacttgggagacaaaggtccagaattcaaggacacctagactatatggtgatactctgtctcaaaaaagccaaaaccatgaattaattatcattctaacattcatattgagaagaatagcaaagccaaaagccatgctaagatgtctcacaacattgtcccccaacctatctaagcacccttgagtttaaatgatcatcatcccaaatccggaggtcacagggtaccctaaagtcaaaagtcaagttctgggcctacagccccatctcagtagctgagtgattgcatgaggccctgagttccattcccagcacaaaggaggatggagaggaggaggagggagggagggaaggacagagggagaaggggaggggtcggctctcgcagagatcctgagttagtatggcagcatccacacaaggaaactgcagctccaggggatccagtggccttagtaggcacctatgctcacgtgcatcgacacacataagtgtacacatgactgatttttatatatctttttaaaaattagaggagaaagtcctgtttctaacattcgcttcacctgacttgccatggagtctcacaaccaagattccggaagcaaatctactttgctgggctggcaagaacctatttaaagtgaaggaaaaggccaggcctccgtccctgagttatgtctattactataccaccatctaatggtgaggtacattaaaacacaaatgcaatccacatggggactgctggtacccatagcaggtttttgttgttgttgttgtttttgttttatatcatgtgctaatgcagacagttcctaccttcaagattttttcagttttataattatgggaaagccttgcagtcagtagaaatctcacttctgagttgagaattttgatctgcccctccctcagcccctggcctcaaatagggagtttaaagcactgtcacaatactgggcaggagcaggaagtcgtggctcccttaaccctgagggtaaacacccggctctctgggctactgccttgctaagagagctgcttggtagattagtcatggatgcattttctagtcaccaggttctcagctttcaatgcgtttatcaggacgtaaccccatcagaagtcaagaagcatctgtaagccaagtcactattcccccttatcatttatgtacattacctgcacagaataacaggttttgtcatgacattttcatatatgcatataatgtaaattaagcatttttaccattccttatgaatctcttttatcccggtggtctccttcttctttccaaatagttccccttctacttaaatgcctctttaaaaaccaatacattgctcatgaaagaaattatgttgacgtggattggtgggaaggcttgcaataccacactctgctacatggtgaattccacccagtttaaggcaggcctgggtgcttgttctttatggctaattaacactccagtgtgtacatacactgtattttctctgtccattcatcattggcaggacataagctgattgcataacttgattattgtatatgctgcagtgcaccagattccccataggtcaattttaaaaatgtaagagtcctagacctaaagtccttggaaggaagaaaataatgaaggatagaaaaatgcttctgatacactgctcagcttggagcctcctgaggtctgggatctcggggtggggggaaaaacactgatggacggacatgggacctgtcccatcccagcagaccagaccagcccatccagagtctgccagcttcttggagctagtcccaagtcaacccacaggaagaggagagccattggagtattggacctgcttgcacccactggaagagaaccttggaccagtacccaccatgggcacccactggaagacaggatggaaagacaacagtataagaacacattcaacaacagaaagatcactgtgaaaaggccaaacctaagaataataggtatagaagaaggtgaagaaaccaacctcaaaggtgcagaaaacatattagacaaaatcatagaagaaaacttttccaacctaaagaaagacatgccaatgaaagtccaagaagcttacagaacaccaaatagagtggaccacaaaagagttcccttgacacatagtaaacaaaacaccaaacatacagaataaagaagaatattaagagcagcaaaggaaaaagatcaagtaatataaaaaggcaaacctatcagaattacaccagacttctccatggaaactctgaaagccagaaggtcctgaatagatatattctacaaacactaaaagaccatggatgccagcccagactactatatccagcaaagctttcaatcactatagatggagaaaacaagatattccatgacaaaaccagatttaagcaatacatatccactaatccagccttacagaaagttctggaaggaaaactccaacccaaagaactacactcataaaaacataggcaatagataaacacactttaccaaaagccaaaagaaaagaaggggccagatccacgtacaataccaccaacaagaacatatccaaaacaaataagaattaacaatcagtggtcattaatatccctcaatattaatggtcttaactcgcctataaaaagatacaggctaacagaatggatacgaagacagaatccatcctgctgcatacaagaaacacacctcaacttcaaagacaggcgttacctcagaggaaagggttgggaaaagattttccaatcaaatggacctgagaaacaagctggtgcagcaatcctaatatcaaacaaattagacttcaaactaaaatcaatctaaagcaatgaagaaggccatttcatactcatcacaggaaaaatccatcaagctgaagtctcaattctgaacatctatgccccaaatacaaaggcatacacattcataaaagaaacattactaaactcaaatcacacataaaaccacacagatttatagtgggagacttcaacacctcattctcaccactagacaggaccaacagagagaaacttaacaaagaaacaaaggagctaacagaagttatgacccgattgagtttaacagacatctatagaacattccatccaaacaaaaaagaatacatcttcttctcagtgccacatggaaccttctctaaaatcaaccacatacttggcaacatagcaaacctcaaaagatacaaaaaaaaaaatggcataaccccctgtatcttaccagagcaccatgatttaaagttagaattcaccaacaacacaaattgcagaaaccctacaaactcatgaaattgaacaatgtgcatttgcaccattcctgtgtcaagggagaaataaaaaaaagtaattaaagacttcctagaattcaatgagaatgaagacacaacatacccaaacttttttttgtttgttttgtttttttttttgtttttcaagaccgggttttctctgtgtagctttggagcctatcctggcacttgttctgtagaccaggctggcctctaactcacagagatccacctgcctttgcctcccgagtgctgggactacaggcatgtgccaccaacacccggcagcatacccaaacttatgggacactttgaaagcagtgctaagaggaaagttcatagcactaagtgctcacaggaaaaaagcagagaatagtctacactagagaattaacagcacaactgaaagatctagaaaaaaaagaagcaaactcacctgggaggagtagacaccaggaaataatcaaattgagggctaaaatcaataaagtggaaacaaagaaaacaatacaaagaatcaatgtaacaaagagttggctctttgagaaaatcaacaagatagacaatatttatccaaactaaacaaaggcagagagagaacatgcaaattaacaaaatcagaaatgaaaagggagacataacaacagacactgaggaaattcagagaatcttcaggtcatactttgaaaacctgtactccacaaaattctaaaagttaaaggaaatgaacaattttctggatagataccacttaccaaaattaaatcaagaacagataaacaatttaaacagacctataacccctaatgaaatagaagcagtcatcaaaagtctttcacccaaaaaaatcccagggccagatggtttcagtgcagaattctaccagaaattcaaagaacggctaataccaatactcctccaagtgttccacacaatagaatcagaaggatcatttccaaactcttttttatgaggctacaattactgtggtaccaaagccacacaaagacacaactaagaaagagaactacagaccaatatatttcatgaacattgatgcaaaaataataaaacactggcaaatcaaatccaagaatacatcagagaaatcatccaccatgatcaattaggcttcatcccagggattcagggatggttcaacatatgaaaatccatcaatgtaatccactatataaataaactaaaaaaaaacaaaaaacaaaaaaacatgatcatctcactagatgctgaaaaagcctttgacaaaatccaacaccctttcatgataaaggtcttggagagatcagggttaacaggaacatagctaaacatgataaaagcaacatacagcaaaccaacagccaatatcaaactaaatggagggaaactcaacttgatttctctaaaatcaggaacaagataaggctgtccactccctccatatctcttcaataatgttcttgaagttctaactagatcaataagacaacaaaaggaaatcaaggggatacaaatcggaaaggaagaagtcaaactttcactatttgcagatgatatgatagtctacataagtgaccggaaaacctctaccagggaactcctacagctgataaacaccttcagcaaatcggcatgtacaagatcaactaaaaaacaaaaatcagtagccctactatatgcagacgataaatgggctgagaaagaaatcagagaaacatcaccctttacagtagccacaaacaacataaaatatcttgggattacactaaccaaacaagagaaagacctgtataacaagaactttgagtctttaaagaaataaattaaagaagataccagaaaatggaaagatttcccatgctcttggataggtaggatcaatatagtaaaaataacaatctttccaaaaagcaatctacagattgaatgcaatccccatcaaaatcccaacacaattcttcacagaccttgaaagaacaatactcaactttatatggaaaaacaaagatccaggatagccaaaacaaccctgtacaataaaggaacttctggaggcatcaccatcccttacttcaagctctattatagagccatcatcctgaaaacagattggtattgacacaaaaataggtagacaaatggacctgaaaaccctgatattaacccacacacctacaaacacttgatttttgacaaagaagctaaaattatacaatggaaaaacagaaaacatcttcaacaaatggtgctggcgtgtagaaggttgcagatagatccatgtctgtcaccatgcacaaaacttaagtccaaatggagcaaagacctcaacgtaaatcctgccacattgaacctcttagaggagaaagtggaaatacccttgaatgaactggtacaggagaccacttccaaaatataacaccagtagctcagagattgacaattaataaatgagacctcctgaaactaagaagcttctgaaaggcaaaggacacagtcagtaagacaaaaacggcagcccacagactgggaaaagatcttcaccaaccccgtatctgacagagggctgatctccaaaatatacaaagaactcaagaagctagtcaccaaaacaccaaataatccaattaaaaactgcaggatacagaactaaatagagaattctcaatagaggaatctaaaatgactgaaagacacataagaaagtgttcaacgtccttagccatcagggaaatgcaaatcaaaacaactctgagataccatcttactcctatcagaatggctaaaatcaaaaacaccaatgacagtttatgctggagaggatgtggagaaaggggaacactcctccactgctggtgggagtgcaaacttgtacagccactttggaaatcagtatgttggtttctcaggaaaatgggaatgagtctacctcaagattcagcaattccactcctaggcatatacccaaaagaagcacattcatacaacaaggacatctgttcaactatgttcatagcagcattatttgtaatagccagaacctggaagcaacctagatgcccctcaactgaagaatggattaaaaaaaaatgtgtacatttacacaatggagtactagtcagtgggaaaagaacaatgatatcttaaaatttgcagataaatggatggaactagaagaaaccatcctgagtgaggtaacctagtcacagaaagacaaacatggtatgtgctcactcatatatggattttagacctagaacaaaggattaccagcctacaatccacaccaccaaagaagctagtaaacaaggaggaccctaagagagacatacatggttccccagagaaagggaaaggggcaagatctcctgagcaaattgggagcatgggggaggtgagcgggagctaggagaaagagaaggggggaagaggaggggtgaggaggacatgagggagcaggaaggttgagtcaggggaagaatagaggagagcaagaaaagagacaccatcatagagggagccattataggtttaaagagaaatctggcactagggaaatgtccagagatctacaaggatgacccccaactaacaatctaagcaatcgtggagaagttaccttaaatgtccttccctgacaatgagattgatgaccaccttatatgccatcctagagccttcatccagttgctgatggaagtagaagcagacacccacagctaaacactgagatgaactcctggaatccagttgcagagagggaggagtgatgagcaaaggggtcaagaccaggctggagaaacccacagaaacagctgacctgaataaagcggagctcatggaccccagactgatagctgggaaaccagcataggaccaaaccagaccccctgaatttgggtgtcagttaggaggcctgggcagtctatggggcctctggtagtggatcagaatttatccctagtacatgaatggactttgggagcccactccacacagacggatactctctcagcttagacacatgggggagggcctaggccctgctccaaatgatgtgacagactttgaagattcccccatgaaaggcctcaccctccctgcagagcagaagagggggatgggatgggggtaggtggggagcatgggaagaggggagggagagggaactgggattgacatgtaacacaagcttgtttccaatttaaatttaaaaatatagaagaaaaaacccaaaactcccaaatcatacgataaaaataaaattatccatttaagatattgtttaaaccaggtgtagtggcacacacctttaatcccagcactcaggaggcagaggcaggtggatctctgcgagttcaaggctaacctggtctacaaactgagttccagattagccagggttgttacacatagaaaccctgtctcaaaaaaaaaaaaaaaagacattgtttaacctttcctataaatgagaacttaacaatagaaagattagtagagtagtgtgcacacagtatattatcatagagaagataacaaaactaaaccacaattctgtgcggagactatccttagctctaagattaaagacccagtgctagagaaatgtctcagatcttaagatcacttgctgctcttccaggggacctggttcaatttctagtactcacttggaagctaacaaccatctttgactccaattccaaaggatctgatgccctcttctggctaccgagagcaccactcatattcactcagacaaaacacacagaaaatgaaatttaagttttttaattaaatcaaagtcataacaaaattgttacataaggaataaagaaggcaaattatcaacattttgccttctgttcttggtaaagaatgtaaacgacaatttctttaggactttccctcccagcaccaaatgttgacattatgaatggtctggggaatttactgaccagtgaaaacaaagcacgtctctccctacccctaagctctctcttgtctccatccacacagggcacacatcaagggtttgctttctaccatgctctccaactcggagccatgtcagaaaacacaagtatgttgagcccggctgcagaacctccagagaggggaccaccaaagctaggagggtggcatggaagatgacaaccagatatcgacttgtagaagaattgccgtggggacagcagcaaaatgagaaagtaaatggggactccctgaagcatggcttcaaataccagtttgactgtgaaattctgagacctatttgtactcttaaaagtgacatgcactagctgagcacagcagcacttgcctgtggtcacagctacagggaaagccgaggtcccaggatgacttgagcctgtgagtttggggacagcttgggcaatatagcatggggaaatgatggaggggtgtacatttccagtcaggacaatgggaaggggctgccataagatcagaggggacaccttctgagtggagatacacactgatgggccccttcccaagcagagcctccccactctctaaatacttgtgcacagatgccaaacagttagaagcatggctaaaacacagaactgtacaaaactacccaacctatcttgtaccagaaaatatttatgacattatttacattttatttacttttattttcattgtagcagataagacctaagcaccaatcacagaatcatatcacaaccagtgtttttttgatgtgtgcttatatctttttatttttgaggcaaggtgttgctaaatagccccagatgatctagaatttgatatgtagatccaatatgctttgagttgacaatgttcctcctgcttctgtcttctaagtaccagcattacagacctgtgccaccacagctgacttcactagtcgttatctgtgatgtgcaatgcacatattcctgtgtgttgtcaagggtttctattgctgtgaagagacgccatgaccacagcaactcctacaaggaaaacattgaactaaggggctcacttacagtttcaggcgttcagtcacttattatcgtggcaggaaacatagtggcattcgggcagacatggtgctggaggaatagctgagagtcctacatcttgtaggcaacaggaagttgactgagacactgggaggtatcctgagcataggaaacctcaaagcccgcccgcacagtgacgcacttcctctaacaaagccacacccacaccaacaaagccacacctcctaatagtgccactctctatgagattatgggggacaattacattcaaacttccacttgtatgcagctgtgtacacacccatgcatgagcattcagaggccagaggtcaacgtcaggacttctctctaccttatctttctaaaaataatctttatcccatgtatttatagtgtgtatgtgtgagcacctacaggccatgacatttatgtggaggtcagttttttgttttctttcgccatgtagattttgaggattgaactcatgttgtcaaggttggcagcatatcaccctgagccatcttgccagtcccaccccacttttttagagactaaaaaagcctaaagttcacagatgcagctagaccatctgaccatccgaacccagcctcctcctctgtctccgcctcccagtgctggggttataagtacacccagttttttatgtgggtgccggggatctgaactcgggtccacatgcttgtacagtaagcactttgccaggtgctttactgatcctgagcccagccggtgctgcttgaagtgttgtttcaaaacaataacttctgcatcatctaagaacttggaaaaagtgaatgttcatgcttcatcccaattctaccaaatcagcagctcgggtatgtgtttgaagttctctgtgtgattcagacacgcttgtcaacctgagagccactatcctaaatgaagacactaaaggagtaaacaggggcgtggctcgttagttaagaaatagctcatgagggccggccaggtctggttaaaaccagaagctcagggatcgacaccttcaacctgcttctgcagctcttccacgggtcaagccacgtgccactccagcccagaccagtctatccacctcaccagcgggttattctgcctgggaacaggagccaggccactggagcaaagctagttagtacctgtggtggagctatgtggagaggtccctggggaccctgcgtctccttattttgtttgctaatctctgggatcggtggttcacttcctagcctagcaagaatggttggcaggcgtccgtggtttggtgggagaaactgtgccctggaacactgagatctggccgagcacaaaggaaacagtgtggaactgctaacagcttgtgaaccgagatagcacagaaccaccagcgagccccaggaaggaggctgagagccattcattctctgttctgataaacacacaagtttcagaaaaggtgtaaacaataccgtaacgaaagcccatattcccacacctagaattaataaccgctagctcaatgtcaaatgtaacggcggcctttcaaagctgtgaagagatggcatctggcaatgctctggggagagggtgggagaatgagaagggagccttcagaacagggagaaacaaagtatttctgaaatctttttcaatgaagagagtcctccttttatcagaaaatgttctgaacaggaggcttccacagtactgctaatcacagctcaaaaacttgcccagttggaggctaggaagttggaatttacatataatgataagcagaaaagtagccagaaagcaaaccagctcctttgggttggggataataatgacaagctttagttttgttttaaagatctgggggtggaacccaggctcttgtataggttaggcaaggtctccaccaccaagctgtattcccagccctttctgcaatatgcttctggaccccccccccccatgacccatctgagagagaacgggaaagaaaccagaacaagctaaaagaaagtgggagatgactcaggaaggcacatgctttttctaccgcttttatgggggtggagctcaaagcctgaccacctagaaggagccattgccagtactaaccatgactgcctggactgctgaaacttgctacccagcaaagtagacaggaagcaagagcctgtgctaaaggtaccttgttaccagggtaggaacaggaccaaggtgaaaagcttggtggctactctccacaaggacagagccacccacctagtgtagatccagccaaggagcaggtgggaggggctatccctgcccctatccaaccagtttcacaaccactagacagcgcttaaggcgaggtccagagcctctgaaaagatgccacccatcttttgttttgttttgttttgttttgtttttaagacagggtttctctgtattgttttggagcctgtcctggaacttgcttggtagaccagactggcctcaaactcacagagatctgcctgcctctgcctcccaagtgctgggatttaaggcatgggccaacaacgcccggtgatgtcacccatgttaacttggcagttgtagcactcgtctttaatcctagcactcggggcagaggcaggaggatatctgaatttgtggatagcctggtctacagagagagttataggacagctgaggcaagacagaagaactctgtctaaaaagaaataaaggaaggagggagggagggagggagagagagaaagagagagagagagagagagagagagagagagagagagagagagagagagagacagagagacagagagacagagagacagagagagagagaagaaagaagccatagtacagagggtgctgtttctgttccttgataagctcagtctatcaaggggaaaaaaaaaaaaacaaaccgacacttttccctccctcaacccatctcagagccattctcctgcatctagggctgcatggaatttattctgctgaaccagagaaccagaggcctgggctggagatgtggctcagttggtagagtgcttgcctagcacacatgaagccctaggttcagtcccagcactgcataaaactggctgtagtggagcccagggcagggggacgagaagttcaaggcaaccctaatcctctgctaccgtgagtttgaggccagcctgggctactggagactctgtctcgtggtggtagtgtgggcgtgggtgtgggggcaggagggatcagagtgagagagagaatatcagaagccaagaaactgccccaggaatctttccttgtgtatgtttatgcgtgtaaataaatctaatatcctccttggagatctctccaaggaaaatgcacaaggtggctgggcagccccagttcacttccctcccccaacccgagtacataactgtgctgtaacagctgtcagggccaccctgaagcatgctacatgtcttgtgtacatgctacatgttggcacagaaggctcagtacacggaccccacagtgactgtgctgccctggggccttgaccctctatccatgcaaggtgagcctgtttgccagatcagaccgacgaggaagtctgcagaaacattcaggcccatcagaaaccagtaacaagaaatggatttttcacctgtcttccagtgaggaaaaaatattgaagggaagaaaataaaagtaagtctcattgtccactgcccaactcactttagccaccccctcccacaaaaaaaaaaaaaaaaagcaagagattaaaactgcacttccaagctttaaacaccgcattttctgttgtgtcagtgatagaaatgggagccagaacagggtggaaggtgtgggattgcaactcccccatttccctgctctccacatattagcagccaaaattcttctttctatgggtttggtcactgtagatctctcagtagaggtaaaagaacataatatttgtcttttttgtgactggtttgtttttttgtttgtttgtttggttggttgatttttttgagacagggtttctatgtgtagctttaggagcctatcccggcactcgctctggagaccaggctggtctcgaactcacagagatccgcctgcctctgcctcccgagtgctgggattaaaggcatgcaccaccaacgcccggcatgactggcttgtttttacctaacacatcatctgctgggttctttcatgagatagcacatatcaaatttccttcctcctctgtctctctctctctctctctctctctctctctctctctcctctctgtgtgtgtgtgtgtgtgtgtgtgtgtgtgtgtgtgttgctggatattgctgatggctctgtatacactacataaacaaggttgcattgagttctccatcccctagaccacaaggaactttgaattcaacttacccaaaactaatattttgtctcaaatacatctcccctgatgttctccatcttgctgcataatgcaactattcctccaagtgccaaagccagaaaccagagtgaatttttgatcagttgcagcaattccctttctctgctacctcctgaatcttcccattttcctgctcttgagtgtcagtcttggtctgggacatctgtgctccacacacacttctgattcctgtctaactctgatgtatccttctcactgaagccaaagtcatgggttttgtttcttaaagatttgtttatttaataagtgcagatgttttgcttgcatgcatgtctgttcaccatgtgggtgcagtgccagtgggagccagaagagggcgttgggtcccctgagctggcgttattcacctccccttttcaacatcctttagactctcccgaaggtcttcaggataaaagctcaagaccattccaatggaaagttatttgtcataagcttgcatgaaccagtctcagcctactttttcaccgtacctgtctttatcttttgggccaaacagtctgtagtggcccaaatatgatacagttcttcttaccagtaattcttgatgcaaacattttctccctctctgttccctctgttgtctaactcagtatcatctttggtcctccatttggactgggttctcctatgtgtttccatagaagcctgtggtcaattgcagtaggtcccacagggcctcttacctagactcaggactgtaacttatgtatttggcttctccagtgtctagcacaaaacaaagcacatgctgtctgtatatctaagtggtcaaggagttttccggaggacaatgacaaccgtcctgagtccttagatatggctaggaaatggccagatgaaaacagttatggactgcttggaatcaccaacaaccagtgttttgtcctttccggaataaatgcttcctccggctagtaatttgctttgcctgcccacggtgcacttacaaagcacctcatccaccagcctacatagcactgctgctggccgtggggcttacttcatggcaacactgtggcagtgagtctgcactcatgtaattcactagctgtaactgttccccaccagcctgaagcagccagtgacttttaaagacttggttacaatgccagctaggtgacagtattctgtggggctggaagaaggttcttcagaaggctgtatgtgtgacccaggtacgccaacatatagcactttcaccaatagggaggttttagtggttcaaagtcactgtacactgatggggaatgtacttctgtgtatgtttatcttattgattttctgctccgctcctgctccagcgacacaatgtgatccaccggcaaggagggacgccaataaggcgtctgataagataagtcttataaaatatataggtttatgatagctaagactgagctaacagatgagaatcctagtcattggccaagcagctttgaacctaatacaaatctttctgtatattcatttgggcctaactaaggcgggcggctggcgtaaagcacacacgtggcggtggggctcaggcagcttttggcagaaagatttatcgtaacagtacacctagttattgaggagcaaaatttctgcaatgtcatgcgctacttgcctagttgtctcttgttcccagagaatgcttcaaccagggactgggggattccatctagtcagaagttcagatacaatgtagccactttggcttccccaagcctttgtatcaatgtgctaaggagagaattgaagattacatttagggtgtttgttctccatcaccaacacaaaattggactactactggatagtagagctaggaagactatttgggggcagtggtttacttgtatttccatgccctgtgattaaggtcaatggaaaggtacaaagacccaaagactactaatttctcagtctcttcaggcatgaaggctcctgtagcacgaacaataaaaacccagaggcagatgttggggcagaaaagcaaagcagccaagtcaccagagagttcttacctctaccaaggctggggccatcctgtccttagcatgactggagactgaatgacctgagaccctgagctcctgccttatattcctctctagtgctgggattaaaggtgtacaccaccactgcccagcttctatatctaactagtgtgcttgctgggattaaagatgtgtaccaccactgcctaacctctatggccgtggatagctttgcattctgatcttcagacaagctttattagatcataaaaaaatatcaccacaggctcctgtcactcaatctgcatacaatcaaaatcaattttggtgctcttggcaaaggagatacaggcgagcaatggaaagtggttataaacaccagccatgggagctggagaggcagctcagctgtaagagcatttactgctgtagctgaggacctagatttgatccccatgcaacttacaaccatccacaattccagttcccggggatctagcatcctcttctggcctctctgggcactaggcatgcacgaagtacacatatttattttcaggcaaaacactcatacagacagtaaaaatacatctaaaataaacccaccatccatgaccaggtgaccagttacaaaaatgagcactataattttcatgtttctccctcttttattatgaatatgtttgtgtatatgaacatttatattatagttctatcaaatatctttgcttttctttcttcttccattcccctgccgtacactttaagatcaaattgacttttatgtcagtattcaaatactgttaatatttcattatagtacctggaaaacagtaaacaccagtggaggactttaccctctcttccaggaacgatgaatgcattttcttttcaagtgtatgaaatataaatatgccatattgggtggaactgtgactttttactgtctttctttagagatgaagcatgactggagagatgaagctgaaaatgagtgcccagttcacagagagggtgacttggctatgacacggtttctgtgtcagtttgagggatgtccaggtggctgataaaacattgctttggggtatgtctagagagattagcagatcagtacactatttaaaaagacccacccttaccagtgcaggaggaagcgtcccttggatcgagccctgacctgagtcaaacaaaagggtagaggggggatgtctttgctcctgttcttgttgctgtgataaaatacccagacaaaaataagctcaaaggagaaagggtttatttcagctcacagttcaaggcagccagtgacaggacatctacaatcaggaagcagagtggggtgaaggcatgcgtagcgatgcttgctcagctttctgtctttaggtgcacagtccaccatggaatggcttacccacagtggcaggtcttctcacctcagttaacacaatcaaggtactcttccatgggtgaacgcacacacactcatacacacacacgtgaaccacccaacttccagatcttctaaactaccagacaattctagattttgtcacattgactggccatcacaaagtacaagtttgctcattgtgtttgaattggaatgtccatattctctggcccttaaatgtcagtgctcctagttctcagattgttgaactcagactgaattatgccacaaacctacagacggcagactgtgggcttcttctaacttgtatgtacaccttctggttctgctgctctggagagccctgcctgatgcaataggtcaagaaccagctcaggtgatggaaacaattaccaaagatgtggctatgagttataggtgcagacgtagacatacagacagacagataacagtatggctgagaactgcaagttattcaaggtggcttgagcccaaggcaaggagaaatggtgatagacgaagccatatcatgtttgctagtatcaggaaatccaggctaccaaaacatggaaatataatacaaggtccgctaaagatgacctgcaagcatcagggtttaagatccagcagtctctggtagtataaagcatgacatcctctcagagtatttggattaagtgatggattgactgtctccatagtttaagtcccaagggctcctccaaggtctctgtgtgagaaacttggtctccagcctgtgatatggtcggggtgggtggtacctttaagaagtggtgtctaatagaaggtcaggagggtgtgctcttgaagtggattgtgggaccccaactcctttctttctctctttgcttcccagctgcagtgatggaaataagcctcctttgccatatgctaccatcattatgccctgtgccaccatgggctcaaagcaaagggctgacaaccatgtactgaaacctctgaaatgatgagttcaaataactccttcctcttttaagtggattctctcgggtatttgttatagtgtcgtagagctgactcacacagctacgcactgcaggtctccctcacacatctgctgaactggacaggctaatacaccaacactgacagactagggagggaactctgttggtcgagacctcccgtagatatagaacataaatcccctagcactgaataacccaggcaaggtggtgcgcacccagcactcaggaggtagaggcaagatgatcaaaagtttgtagtgagtttgaggtcagtctgggctacgtgagacctaataaccaaaaaaggaggaaagagaaaagacgagacctgccagacggggaagacatgttcctggagggattgtcacatggtaggttcagatctgcacaccgatcgacagaaaccagtccagagctaaggggaggccccggattccgatgtttgttcctcaggcaataatagcccctaacctgacctcaggttttttgctgtttgtatgtggtgtacttcttcaccagctacccagtcctctctttctctgccccttaccttgcttgacgaatctcggtctttcacttacacccttttgagcctgttgccaacagctttcagagcctgtctccctctctggccaggctcagattctaacatgtttcccaggtcaactcccccctccgtcatcacctgggctcagcctgtctcattctttgaccctcaggtctgagttagtgaaggaagaatgtccccttgggccggtggtttggctgccaaaggtcagcaactgccacacaggaagcctgtgcaaacaggccacagccaaaaataaagagggaggcaccgccgcaaaattcactgactcagtctggcctctgccccgggaaacattccccggtgaagtcacaccctccgccctccgaggccgctcagaaagacggtttgtttgggttttttgtttttttttttttttttggaatatggggaaatttcccaatgagagcgtaagtgactggttagtttccgtttgctgccacctcccgggaaaggtgcgaactgcaggcctgcggtgtgcgcggggaggggtgggggaagtaaggtcgccccggaggagcaggcccgaggtaaagtgcacctctgtgaagccactgttggagggagggtgacagtcacagacatttggatgcaaaagggggcaaggaaaacgttgtggttgggagccctccgcctccggtggactatgaagtcctccgtttctaagccaatttcccccattcccatttctctcttgcctggtggaagcctcccttcctccgccttcctaaacagctccttcctcccctcaatccaccctgcacacagcagccagttgaaaaccacttagtcgttcatggatgcccttacaaggcacacgccacaacccaaggtcctccctcaaaaacaggcaggcactggagatttctagtctaggacaccttaaactcagtcctcgccttcaggaagtccctctttccagttccaatcgccctttagatagctgctcagccaataaccactgctcaaggaaactccccagactgtcaaaacccaggtacttctgccatcaactcttagcgtttctcatgcttcgcctcatagccagcaccacagtttaatgacctctgtgtatattcatttaattaattttttattccccctaaactgtaaatccgtatcactgatatcttggaaggcaggagtttagcatgatcacacatacagcctacaaacacacacacacacacacacacacacacacacacacacacacacaccacagtgaaattgactagacctgaggacttttttttttttttgaaacagggtctctgggtagtcctagctgtcttacaactctccatgtagaccaggctggcctcaaactcatagagatccacctgcctctgcctcctgagtgctgggattgctctcactattactactccaggatatgtggattttttcctatgcaagaatagaagaagggagaagtctagcttgctctgtgtgttggtaacttttctcattgctctaacaaaagcaactgaaggacatgggggatttatttgggctcacagtttgagggcataggagtgtgagaggcaactgtcacattgtatcctcaatggcggaagtggaagccagagacatgaaagcccttgctccatttgcttttcccgttttgttcaatctggtaccccagcctgtggactggtgccgcccacgtttaggtttggtctccccacctcagttaacctgttctagaattgccttacagacatgcagaggaaattctgggtcctgccaggctgaccatcagttttaaccatggccgaagtgcattggtgaataaaggggaaatgaagtgtagaattgttgcagggtatctgaccacactctccaccgtgagattgtgttatttactggaaaaacctgtttctagctgaggtgtagctcagccctagctcacatttttaattcaataactttctgttgaatattgtaaacaggatgcaataaagtcaaccataggtcaagaggtagaagaagcaaccagttgacaggaagtaaacatagaattattaaacaaacaaacatagagggtaagatggagtctggagggcagatagagagatagacgcacaggaagtagaagagcgcgacattgagtttgaggagttcggatggagacagtggagagagggagaaggcttctgcttctggggcgtcagccgaggaagaatgtcagctgactgttctctctgcctctctgagctagcctgcttccaccccagcatctggctcccaggtctttattggtaaagttgaatgtctgagattttgttaaaaacaacataggctaattggagcagaactgagaggtgaggtgatgagagaccatggagggaaggccactggattgatgactgctaaaatcctgatgggccaaacgtgtagctcggtggtagggtacatactagctagcatgtgtgaggccctgggttcaatctctggtaccaaaggggaaaaaaataataaaagaaaatattgaagccctctgttctatcttaattcatgttgctatgataaaacctctgaccaaaaagcaacaaaggggaggaaaggatttacttgacttacacttccgtgtcacagtccctcactgagggaagtcggggagcctggaggcagggaccatggagaggaagcttgcttgtgggctcatcctctggcttatactcagctagctttcttgtatagcccaggcccactttcttagggatagtaccgcccatagtgggcttggcccttacacatcaaccatcaatccttcatagacatggtcacaggccaacctgcttgggctatccctcagttgaggctcaggtgactctaggctgtgtcaagcaggcagctaaaactaatgagggcatgctcaggcactctgtccaggtttcagaacaggtgatgccgtttgtacagtgggagggagtcagacttgagtgccatattctgaggcccaggcaggtgggattcctttagttagtaacccttttttgagtctcttctctaagtagttgtgactcctcttagacaccagagggcactcttgaggctcttctgggcagcttgtcatggccgctggcactgaatgtgattgtttactatgccgcaggctgggccgggagctctggagaggtgccctgtttctgcagtgccaggcaggtggcgccacagacatctacagtgcctgtttgttttgattgcttactgtgttttaatccccttccttggacaaaacggaaccttaactttttggttttagaattaatcttttcccttatattttggcgggacattaaatcaagaagcattttaccatggccaagagtgggcagatgatctagcaagggcactcgcagaagctctgagagtgaatgtgtgtgtgctacgtgtgtgttcatctgtgtgtgttcatctgtgtgcgtgtccatctgtgtgtgtccatctgtgtgcgtgtccatctgtgtgcgtatccatctgtgtgtgtccatctgtgtgtgtccatctgtgtgcgtgaccatctgtgtgtgtgtccatctgtatgcatgttcatctgtgtgtgtgtccatctgtgtgtgtgtccatctgtgtgtgtccatctgtgtgtgtccatctgtgtgcgtgaccatctgtgtgtgtgtccatctgtgtgcatgtccatctgtgtgcgtgtccatctgtgtgcgtgtccatctgtgtgtgtccatctgtgtgcatgtccatctgtgtgtgtccatctgtgtgcatgtccatctgtgtgtgtccatctgtgtgcatgtccatctgtgtgttcatctgtgtgagtgtccatctgtgtgtgtgtccatctgtgtgcgtgtccatctgtgtgcgtgtccatctgtgtgcgtgtccatctgtgtgcgtgtccatctgtgtgcgtgtccatctgtgtgggtgtccatctgtgtgcgtgtccatctgtgtgtgttcatctgtgtgcgtgtccatctgtgtgtgtgttcatctgtgtgcgtgtccatctgtgtgtgttcatctgtgtgcatgtccatctgtgtgtgtgttcatctgtgtgcgtgtccatctgtgtgtattcatctgtgtgcgtgtccatctgtgtgcgtgtccatctgtgtgtattcatctgtgtgcgtgtccatctgtgtgcgtgtccatctgtgtgcgtgtccatctgtgtgtgtccatctgtgtgcatgttcatctgtgtgcgtgtccatccgtgtgcgtgtccatctgtgtgcgtgttcatctgtgtgcgtgtccatctgtgtgtattcatctgtgtgcgtgtccatctgtgtgcgtgtccatctgtgtgcatgtccatctgtgtgtgttcatctgtgtgcgtgtccctctgtgtgtgtgttcatctgtgtgcgtgtccatctgtgtgcgtgtccatctgtgtgcgtgtccatctgtgtgtgttcatctgtgtgcgtgtccatctgtgagtgttcatctgtgtgcgtgtccatctgtgtgcgtgtccatctgtgtgcgtgtccatctgtgtgcgtgttcatctgtgtgcgtgtccatctgtgtgtgtccatctgtgtgcgtgtctatctgtgtgtgttcatctgtgtgtgtttttatctgtgtgtgtgttcatctgtgtgcatgtccatctgtgtgcgtgtccatctgtgtgtattcatctgtgcgtgtccatctgtgcgtgtccatgtgtgtgttcatctgtgtgcgtgtccatctgtgtgcgtgtccatctgtgtgcctgtccatctgtgtgtgtccatctgtgtgtgtccatctgtgtgcgtgaccatctgtgtgtgtgtccatctgtgtgcatgttcatctgtgtgcgtgtccatctgtgtgtgtgtccatctgtgtgcgtgtccatctgtgtgtgtgtccatctgtgtgcgtgtccatctgtgtgcatgtccatctgtgtgtattcatctgtgtgcgtgtctatctgtgtgcgtgtccatctgtgtgcgtgtccatctgtgtgcgtgtccatctgtgtgcgtgtccatctgtgtgcgtgtccatctgtgtgtgttcatctgtgtgcgtgtccatctgtgtgtgtgttcatctgtgtgcgtgtccatctgtgtgtcttcatctgtgtgcgtgtccatctgtgtgcgtgtccatctgtgtgcgtgtccatctgtgtgtattcatctgtgtgcgtgtccatctgtgtgcgtgtccatctgtgtgtattcatctgtgtgcgtgtccatctgtgtgcgtgtccatctgtgtgcgtgtccatctgtgtgtgtccatctgtgggcatgttcatctgtgtgcgtgtccatccatgtgtgtgtccatctgtgtgcgtgttcatctgtgtgcgtgtccatctgtgtgtattcatctgtgtgcgtgtccatctgtgtgcgtgttcatctgtgtgcgtgtccatctgtgtgcgtgtccatctgtgtgcgtgtccatctgtgtgcgtgtccatctgtgtgtgtccatatgtgtgcgtgaccatctgtgtgtgtgtccatctgtgtgcgtgttcatctgtgtgcgtgtccatctgtgtgtgtccatctgtgtgcgtgtccatctgtgtgtgttcatctgtgtgtgtttttatctgtgtgtgtgttcatctgtgtgcatgtccatctgtgtgcgtgtccatctgtgtgtattcatctgtgcgtgtccatctgtgcgtgtccatgtgtgtgttcatctgtgtgcgtgtccatctgtgtgcgtgtccatctgtgtgcctgtccatctgtgtgtgtccatctgtgtgtgtccatatgtgtgcgtgaccatctgtgtgcgtgtccatctgtgtgcatgttcatctgtgtgcgtgtccatctgtgtgcgtgttcatctgtgtgcgtgtccatctgtgtgcgtgtccatctgtgtgcgtgtccatctgtgtgcgtgtccatctgtgtgcgtgtccatctgtgtgcgtgtccatctgtgtgcatgtccatctgtgtgtgttcatctgtgtgcgtgtccctctgtgtgtgtgttcatctgtgtgcgtgtccatctgtgtgcgtgtccatctgtgtgcgtgtccatctgtgtgtgttcatctgtgtgcgtgtccatctgtgggtgttcatctgtgtgcgtgtccatctgtgtgcgtgtccatctgtgtgcgtgtccatctgtgtgtgtatccatctgtgtgcgtgttcatctgtgtgcgtgtccatctgtgtgtgtccatctgtgtgcgtgtccatctgtgtgtgttcatctgtgtgtgtttttatctgtgtgtgtgttcatctgtgtgcatgtccatctgtgtgcgtgtccatctgtgtgcgtgttcatctgtgtgcatgtccatctgtgtgcatgtccatctgtgtgcgtgtccatctgtgtgtattcatctgtgcgtgtccatctgtgtgcgtgtccatctgtgtgcgtgtccatctgtgtgcgtgtccatctgtgtgagtgtccacctgtgtacatatatgttcagatgtctgcagatgcatgtggattcttcctcaatagttgcccacctcatattttaaggtagggtctctcattagttcagctagactggctgctcagagagctccaggatcctatgaccctacttgctctatgctggcttataggcagcaatgctcagctttttatgagttcagaggatccaaactcagggacacacccttgcatatcatcaaaagaactttaccaactgctccatctcccagttccaagagaatgaatcttctttgttgcttttcttctgtagtactggggaccaaacctagaacttcacacatcctgggacagtgttctactatgtgagccaccagccccctgagacagaatcacagagccataaatcatcagaaatgaggtcttggggcacctccgtcctctctttaactcccagatgaatagctgaccagtttccgttggtgcctgtcccatttcaagactggctttccagcctcctgccagctgctcagaaaacgctccttgtgtttggttggctgaagctagttgtgttttatgctcccaaggaatcaagaaaagttagtatctggttcataacttctacttgattaaatacagatgggggtcacagttcaaagccttgaatggaagctaccaagaaaggagatagctgtgagcatctaaaatccagtccattgcagcttgggggactaagcaaggggatgctaaatggcaagagaaggaaggcaagatcttttctttaaaaaggtgtgtgtgtgtgtgtgtgtgtgtgtgtgtgtgtgtgtgtgtgtgtgtgtctgtgtgtgtgtgtgtgtgtgtgtgtgtgtgtgtgtgtgtgtgtctgtgtgtctgtgtgtctgtgtgtatgtgtgtgtctgtgtgtgtgtgtctgtgtgtgtgtgtgtgtgtgtgtgtctgtgtgtgtgtgtgtgttgtacatacatgcccttggaggccagaagagtgcatcagatcccctgaagctggagttacaggcaattgtgagacacccaaattgggtgctggaaactgaaccccaggccctctggaagagcaacaaacccttgtaaccaccagcccagcccctaacagtgctatcttactgaaactctcctagccacaggaacaagccaagatctataaacaaggaaggtcagaaacaaagctcagaaaaatccatattcctgggatattgggagatacatcattgcaaagatcctcaaccttccccagggacagatgactgagatggtgccctcaattcaggatgccatcaggaagatgactaaggagcaaaaatgcccctttctataagccatgtctggctcttattcctgccagagtcagagagagggaagcaccccccacaggctaagtcttctattttcttttattgttgtttgggttttttttcttaaattttttttatgtagcctccaaagccacagagaaaccctgtgtggaaaaaccaaaaagaattatgtatatgtgtttgcatgtatgtgtgtacgtgtgcttgcaggtacctatggaggctggatgagggtattggattccctgtagttggattagagtgaccatgagtcacccagtgtgggagctgggaattgaactccagtcttcagcaagagaagcaagtgctcttagctgctgagccttctctccaactccaagtcttgcattttcaacaacacaggctagactaggtcaaggtaagcagggtaatggcagaggtagtgggttcctggcaaggatggaaaccagaatctcagtgtgatcattgaggtgatggagccccttgacatagagttaggccagtggacaatgtcaccaagctcttgccacactcctagaagctagatgagaaagggggcctcttcttcagaggacttgtgttggtcatgtcactgtccatcagggtgtccccaggacaggatgaaaacctgctctaacaagtgagagcttgcttgtcaacatcccatgttttgaaaccacgaatgttttactgtaaaggggatccctccctgtagccacagactggtaacaggatcaggaacttcgtggctggcaccaggcccaggctatcctggaaagacattgagtaatacacagaattgctagaaagacggaagtatcagaagagacaaaaacagaaatgaagacacagactactgtgtggggaatcggcaagcacactgttcaccaggacagtgggcaacaaggcccccactgctgacactggtgacactggaggttaggtattactgtggtcctgtcaccaccaagtcagacccccttcctctgctccttctcactcccaattgactctaactgcttctaacggtgcctctaactggctgagtctaaaaagagaagagaaagaaagaaatgtgcagaaaaattcctgaatttccctctttttgtttgtttgtttgttgttgttatatggtccaagatggcttccaactgactcattcggtagcccaggctatccccaaacaagcaacccttgcaatcatcttcttgactagctgggatacaaacatgtgctccatacctagcttccctctgccaaatttaatcccattctttagctctttcttaatataattctttttgggggaggggtgggttcaagtcaggatttcactgtgtaaccttggctgtcctggaactacctctgtaggccaggcagtccttgaactcagagatgcacctgcctctgcctcccaagtgctgggattaaatatgtgcatcaccactgcccagcttaggaactattgcttgaggagaaagattggactccactccaaggaggacaaatggtgatttaatgtgaggaagtagggtattggtaggatctgcctatgagggaacaggagctagccagatccttgacaggcagagagatggggaagacaggcgctgataagtcctgaagttggcaaactctgacttcttcctttccctcctgacaaaggtctggtgggccttttatcccaccagcagggctcttattctggctgacaagtccaggctagtgatatattcaaagtcagtcttgaacatgttacatgtttccctaaagctgtggcgcaatcagccctcctttctttaagctgacaagtccaaaattagcggagggaaacccattccaggctgccaaaatcaatcacttaactccctcatggatttagttcccccctctgcctctgcaagggagccattcctctactttattctgtgtgtgtgtgtgtgtgtgtgtgtgtgtgtgtgcgcgcacacacacacacacacacacacacacacacacacacacacatgagagtcttgctatactgcccagcctggcctcaaattaccctgccatctcagtgggccaggtaggtggcgtcataccccaagttttgtgataactcggagaagcaaacccaggccctggatcatccacaccatcaactctgtcacagagctgcactcccagcccaccatgcatgatttcaaagaaaagctcttagctgccaatttgtagcaccttgctagatccctccccagctgtgtaaaagtcgatagctaacccatcacagctgctcatcattacctgccctcctcagggccaccttccatagctgatgtaagtagccctgctgggaagttatgaatcttctctacctgggagaagtgtcaggagaggtgggcccagctatgaactgagacatacagggatatatattttgtcattgcctcagggttggctgtgttcctgcctccccataagcctccagaagaggtcacatccttgcttgatctccagccccaccctgcttcccctcctcccttgcagttttgcctgagataaggaaccccaagcaaccactactctgtcacaggccccaccttcagaaaacagagacttagtcatcttcgctgacatggttgtcaatctccttcccttctatgcacagttttgcagtctgacctgtctctgctttcccaggaggcagccagagggatgctggtgcctccctgaccagggccagggagaggagcatccacctatagccacacaaacgaatgcagagctgagtgtgacaaatgccttgtggagaaaaggtaattaccactgctgtataaggggaactgctctaattaggtggtcagggaagaagtctctgaagaagcgatgttgagtggttatgataactaatcttggttgtcaacttgttgtgtgatgtcctgattgcattctgacaataaagtttgttttgaatcagaaggcggagctagccagtagctgaccaaaattaaccacaatggttttagaggactgaggacagatagagagacaggaagtagtaaggtggggcttagagaggatcttacctcttttggacagaggaacagaagagacaggaggtcactagtggcttatctgccacttctctgatcactcaggttcttaccccaatatgtgactgccgatttttaattgataaagaataactagataaatgctacatcaacttgataatttctccactctaattcagtcagggctcaatcccaggaatagtgacatccaaagagggttgggtctctcacaccaattaatataatcaagacaagcccctacagatgttcctgcaagccaaactaatctagacaagccctcactgagcccatactctcagtaactttagattgtgtcagcttggcaaaaggacccatcgtaggtgtcttgtttgtggtcttggctactcaggaggagaaggcagggggatcatggactccaggagtctaaggccatgctaggaaatatagcaaacctgtcttaaaatcagcttaatgaatgaatgcataaataaacaccttctaaattaaaattaaagtctatcatttgggactctggtgtcagagtgcctgtctggagaaggaaccagtgtgacttatttcactgactcatcacatttgtttcttactttttcaattttcttacatgcatgtgtgtatcatgaaggtgagtataaagggtatgtgtacattttttgtttgtgcagtgaacatgcgtgaggatgcatgtggacgcctaaggtttgtggctcttcaggagtcatctgccttgttctttgagacagggttctcactggcactaggcaaaccccagaaagccttctgtttctgtctccctggccctggattcatagcacacaccaccacgccaggcttttcgacacaggtgctggagctcgaactcgggtcctcacactaagatctctcccgagcctcttagctattttctttagaatgttttcacctttatttattttgtgtgcatgagtatgtgtggattggggggcagggcaggggtgttgagacagtggtttttttttttttttttttttttgtgtgtgtgtgtgtgtgtgtgtgtgtgtagccctggctgtcctggaacttgatttgtagcccaggctggcctcaagctcacagagatccacctgtctctgcctcccaccttcaattctgctggaattaaaatcgtgagtcaccatatccagctgagtatgtgcatgtgcgcaaatgtcatggtatatgtgtggagtcagatgacaacttgtgggagtctgttccttcctgccacagtgtgggccccagggatcaaactcaaatgctcaggctccgcagcaagcacctttacccacttagccatcttgctgctcacatagttaattacttacttgaaacagcatctcttgtagcctaggctgacctcaaactcattaagtatctgagcataactttgaatttctgattccccctgcctccacctctcaaatactagaattacaggcctgtgccatcatgcccagttttatgtggtgctggagatttaagccacagttttatgcgtgctaggccaacactctactaagtcacaaccccagtccacacctgtggtagtttgaagataactagcccttataatctcatagggagtggcactgttatgaggtgtggttttattggagtgggtatggccttgttggaggaagtgtgttactgtgggggagggcttcgaggtttcctatgtttaggataccacccagtgtctcagttgacttcctgttgcctgcctatcaagatgtaatgactctcagctccatatctgtgcgtatgccaccatgctccctgccatgaggataatggactaaacctctgaaactgtaagtcagccaccccaattaaatgttttccttataagagtttgataggagatgttatcctgtatatgtttctattgttggttgatgaataaaacgctgattgaccaggcaggaagataggtggggctaggagaggaggaggattctgagaaaggtaggcagagtgagcccaccagacagagtcatgatgctgccagaggagtaacaccatgccaggcattatcgggtaagccacagcctcctggcaaaacatagattgatagaaatgggctaataattaagacagagctagccaataagaagccctagtcatcagccaacagttgcataattaatatagcatctgtgggtatagcatttgggcctcaagggcccagaaaactcatgcttacacttataagagttgccatggttatggtctcttcacagcaatagaaaccctaactaagaccacacccctaacttttgtttatttattgaattgctacagaaaaagaaaaagaattgttggaatgggtttggggagtagctagttggtaaagtacttgcttagtatatgttaagccctgagttccatacctagtaacaagtatgttcgaacatgtgagtgtgtgtgtgtgtgtgtgtgtgtgtgtgcatgcacacacacacacacacacacacacacacacacacacacacacacagtgatgaggagcagagacagacagacacacagagagaacacactcaggaatgcggtgtctgagtgagtggcttttcttcatacctagtgatggaaggcaggagtcctgtctctttaagctcagagaatgccccacataaactgcatccagccagagggggaagtacccaaaggacaaggaaagggctttctaagaaggaaggagatgaaagtggtgcacctgaagagcctggacggggacaggagttgtgtgagatgagacagatcacaaagacatttatatgggtcaaggtacagctctaacgatgctccaggtcctgggctgcatcaccagcactgaggggtgggacaggaagcacttgtggtctaattagcatcatggggtcgcatggaatacagactcactgaaacttccccaaaccgtattagaataatgcagttctttggttgtccctgtgtcaccaggagtcaccatggagtcaggctatgagctaaagctctccttgttttcaaaagtgcaacagttaaccccgattgtctaaattaatctgagtaaacacctattgtcttcaagggcctatgtaacacaagcagtggtcttcttgtctctctgttgctttattacgaagaggctctctctgagaggatcataacaagcaggagtgggccttgaacgcactctgtctcttcttccatgtccagctctggattctgctttatttctgcagtgacagcttctgctaacagcaacagatgcatccagtttgtagtttttctaacgtgcactgaatcagcctcatcatggctcacagaaatgcagtaccaggctggtggggggagagggggtccccttctccagagacgacattaccagcccaacagcactcctgcttcagagctcttgaattttcagctctgtggggtccttcttcctccaaactacttttaagtgttaatcttcacacacacacacacacacacacacacaccgtgtgtgagcatgcacactctgcatagtaagaacttgtagctggcaccagctgttctttgccattcccggagtttcttcccacacccgtccaggttaatatttttctcttcaatactgtgccttatgaattgcatttgcctcaggccctctggtctctgtgtcctcaactctttgggttttgtgtttgttcctgcccctcgccttagcagttcaaaatctgcctccagggaaaatctggggtgatcgtagggtttgtcttacttgttccatctcagagatcaaacttggcactgattgtgggtccctgtttgaatatagttgcttcctgtatgtgaccagttttctggctgtttatgccagaaatccaagttccatttcaatctctctctctctctctctctctctcttttttttctcctcacagtcaagatagaagtttttggcttgatttcctgaatcaatagcaaacctaaaatacctatatcgaaagatgtgtattcagagtgtttagggaacagctcaatgatggcatatttgccttgtgttcacaatgtcctgggtcaatccctgacatagaaaatatataaaaataagaacctgctttgctttctgttgagagctacaggctttcactgtgtagccctggctgtcctggaactcaccatgtagaccaccaagctggcctcccacatgcagagatccccctgcctctacctctggagtgttgagattaaaggtgtgttgggttggagagatggctaagccgttaaagggtaagctcacaatcaaaaatgtaagagattaaataaaggtgtgcacctccatacctggtacttgctgaggtttagaatgaccatggaaacacaccactggatttgtctgtaagggtgtttccaggtttaactcaagagggaagacccatcctcaatgtgggcatcaccatactctggtcctagactaactaaaaagcaagaaatgagctgagcattggtctttgtcgctctctgctctgtcccactgtcccacactcctgccaccatgccttccctgccatgatgtactgtacccttaagatatgagacaaaataaagccttctgtagctggaagtggtctcaggatatcccatgatgcattgtctaggttcttagcatctctaagaaagaactgagcaagacacaaagcagcagcaatgaaaatataggtttgcttaaagaaagggtaaaaaaaaaaaaaaaaaaaaaaaaaaaaaaaaaaaaaaaaaaaaaaaaaacacagaataaactccacagggtgggagcaggctctagcaatcgtgtggttctgttatggggaatctgaagaaaaggccgcagagatgcctgaataagtcatctggagtctttatttatcaccagtggggctgtcccaagcacagtagcaggaaactgccttgacctccagtttgagtttttaaaggcaaaacctgcaattgtggcgcatacagaaaggcagctctgatcaggcagttctcatagccgggattcttaaaggtccttcccaggcttggctaagtggagcagttgggtaggatactgagcccagggacagcagccataagagagtaggacacgcctttcatccacctgaaggagcgggttgatgagaagcaggtgaatctgtctgaagcctaaggactacaagcagggctagcagcagatggtaagtacatccaggagagtaggtagcaggcattctagaaggaccgctgacaatctatctatcacggaggaatggccctccctttatggcgtggaggcagtagtatggcatggcaaatggggttaaacccttaaaacatgcactgtaaggaggtgaaataatcaaactcatatactttaaaagcctctattaggctcctatgtgcttatgaaatagtagttagtcatacatgattaatacatgaatgaataaacagaccactgtaggatagtgaagctggaggtgacttttaatgtaatgaggtgttacgcctatttataggaatggtatgtatgtaagctcttaatcatgatgcaaatgcacttggaattaagcatgtaccgtttaagagtgtctttgaaatagcttgtttgaccttcaattgactcttctgtgagtttcaattcatgaatcaagtcaggaagtccatgaacatttaaaaagtaataaatgagtctaattggagacgtatcctagttagtcctagctacttagatggccggagatgggtgccccaatgttgtagagcaaccttgggtgactgtccaggcagccagctgtttctgtcatttctcacagtctttggatgtcacttgctcacacttcctgtttactcagttaatattaattccttctcgggtctctgagggagttgaaggctagatatagtacagttatagttttccttgtttaccagactcggaaagcaaactcactaaagaggtgtaaaatgcagaaaacaaattaggtacaagatagaatagataatggaatgttttctctgaattagtcaaatgacctcgacattgctgatacttattgcctgtataattatatatagtttttcttatgtgaactgcagctttcttcttttttgtactagataaaaaatgggaattgtggtgatatattatttatgatttattaaagctcgcctgagggttcagagtgcaaagctagccacaagccttagtggtgatacacctttaatcccagcagccatactagttagtcacagggacagatggtggtggcacacaccattaatcccaggactcaaagagacaagcagatggatctctgttagttcaaaaccacactgagctacatgaaattgatccagtctaaaagagaaacagctcccacagacatgatctcagcacttgggatcacaggcctttaatcccagcacttgaggtattcaagataggagcagataatcagttgggggcattttggtctccagcaacgttgagggcaggaatgcttaagcctgggtagaggtaggagctactggcttggctgctttgcttctctgatctgtctctgagtttttattttttgtgttacaattcccagtaccaacttgtctttactgttcatttatgataaccagcattggagaaaggagtgggttactgcaaaaaccattaaaactatgtatactgtactatatttacatatagttatatatacagttttcccccaaggcttattccctgcttaagagtgaaattttagagtggcaacttcagtctctgaatgttttagcacagttccctttttgctgatatgtttatagtttctttgaacagaaaaccggaagtattacaatctgtttccttaaataatgacatggcaaaacctgatagtagaaacaaacaattctaagttagttatgaaactcagtttcttaaatcagtaacagacatgatttagggtaatttgttataaaagcatggtagcttgccacacagttatcatataatgtgccatgttttaccttccagcgactccacagctggaaactcacaccaagctggacatagtgctgtgtttgtcatttcagaactcaagaggccagtggaggaggaggactgccttgaaattagcctgggttatacggatagtatcaggccaacctgaactactcctgatcatcaagtgtgtgccaccatgttcaactgaattttgtttttgcttttgagacaagatatgtagcccaggcttgcctagaacttactgtgaaacccagtctggctttgtcttttatgtattttggcgttttgtcttcatggatgtctgcacaccactactgggcagtggtggcacacgcctttaatcccagaactcgggaggcagaggtgggcagatctctgtgagtttgagaccagcctagtctacaaagcaagtcccaggaaagcctggctgttacacggagaaaccctgtctcaaaaataagaacaaaacaaaaaaacaagcaaacaaaagaagagtgtattgggttctatgagacaacagttatagatggttgtgagagaccatgtgggtgctggggattgaaatcaggacctgtggaagagtatccagggctcttaaccacaaagacacctcttcagcccccaggctgtctttgaactcacagtaaccctcctccctcagcctactgagtactaggactatatgtgctaccaggcttatctcatattcttttaatcgtttaataatgagaaataatatatttataatgaaatctattaaatgttaaaacatacagaaactatgaaataaatctcaaatatctttcaaggaaccattatgacagattgtacttttcaaaaaatggctgcactaatacatttgtttctctatgcttttctttttcctttagataaatgttttattagggaccaggggttaaaagcactttttaaagctttggcacaggacctggattcagtatccagcacccacatggcatttcacaatggtctattaactccagttccaggggttctgatgccctctgcaggccactgtaagcactgcatgcacatagtgcacatacttgcaggcaggcaaacactcatacacataaaaaaataagtctaaaaagtaaaaaaagagggcctagtggtagagtggttgcctagcacacctaggtttaatactcggtactacaaaaaggaaaaaaacaaaacaaaaccctgtcatattaaaatgctagaggattgaaccccttgttatcctgacctgtatctctcatctttcagtgacatggggcttcttgattgtcttgtaagagctgcagtaacaataagacctgtgtttctgtgattggcagtcaggaaatggaatttcccaggaaggtggagcaatatgggctgaacttgggtaaaactggcatgaaggtcagtttggactcttttcctgggacagctggacacactgcctggcctggctgtaagctgctaggcaatgaggttgggaatgaatgccaaagtgtggggttcactctccagctgaatggttcttggcactctcagctctctgggagattcagtacaagctcctcgtgttactgtaggtagatggcctgattagcatgctgtgtccagtggaggacaaacaattcatttgtccatccttatactggtgttttgttgtttttgtttttttttttaacacaggaacagttgttttaaggaaggaaacatggatgacttgacaatttacaaaactaaggggaaatctcctaaagatgcctagggctttatcagagtcctgtgtgtgttaccaaccctgaattttaggtttctttgcttttattactgagcatttcttatatgttttaagtgttcattatttgttaggcagtgtctcgtgttgcccaagctggccttgaactctctatgtagctgagaattatctagatttcctcctgcagcttctaccccctacatagcctagcactgggtttgggttctcccagtttgccctgcataccactttagtagctgaagtgtttactatggaagcaagaagtccagggttcagacccccagaacctacataaatgtgaacatccatacactatggtaggcagctcacctataaatccagcttttgaaggaggagacagggatccccaaagcaagctggctatggagattatcatgtgggcaagctctggatttgactgggagaccttacctcaaaaggataattggaagagcaatccaggaagattcccactgtcaaccttgtgtctttataggcacaaatacacacatgctcccatattcatacaaacacacacacacacacacacacacacacagagagagagagagagagagagagagagagagagagagagagagaatcagatttccttatgttcttttgcaaacaaacaaacaaaaaacagtctgtggcaggccattctgccttccttcccaagaactcctcaaaatctacttcgcctcagaatcccccttgctgtgcacggggctgtctggagccttcatccagcccatactcttgagtagtgacttttgaaaagtgcctgtatgctatctttcttttttcttttttgagacaggatctcaccatgtaactctaactgggtgggaactctattgtagaccaggctgatgtcaaacacggagctctgcctgcctctacctcctgaattccaggattaaaggtgtgtgctactactatatccagttccctgtaaattttcttaagacagtcaaactttaggtccagattaattagttattaattaatgttttgtgctggggtgtgaatccagggcctcaagtagctaggtaagagctgtacctgcgctatgagccccctctccctcagtgctaagggttttaccacggagtatttcagatggactcttgctgggtagctcagggtgactacagtcacaaccccctggcttctgcactggctaacaatcgccagtttaacaatctaactggtcacattggcaacaatgtattttggagcaagatcatattctgaaagttccagagattaggatttctaagtgtccaggagggggtacaattaagcctgtgtagcaaagaacaagaaggcagtcagttttccctagccaacaggctgggaatggagcagctaaagaacaccctgatggtgtcttggtgtgtccattcaccgccagtttgcatgacaatactttaattgtgtgaaaagctcaatatagacagaaaaattagaccaagccctccacttattactatctgtctgaagaaatcaggcatacctaattaatattaatatttttccatttggagtgactatatgaatacttttgtccagtactgggcaaaagggtgtcatacacaaggcaagcatgctattgaagaacagcatacctagctctactgatagcttgtaagcacttgcaagaaaccaagtagaatttagttttgttttgtttttcaagacagggtttctctgtggctttggaggctgtcctggaactagttcttatagaccaggctgtccttgaactcacagagatctgcctgcctctgcctcccgagtgctgggatcaaaggtgtgcaccatcaccgcctgacatgcaggtagaatacttttaataagtgactaacacatagtaaatcacttaaatgtcaaggtaataaagttgttacatctttgtgttcttacaaggggaaactgagttaggaagtggttatgagtaattttcccaaagctgatcaaggaggaaggcaaagccaccacagcaagaaaatgttggtaaaatccagccaggttcagtacaccaatcatcccagaactcaggaggctgaggcagggggatcaagaatttcaagctagcctactaaaaagcaagcctcagtaaaacaaaatgttactagctttacagtccttgtaaatctcgagtattgggtattttgctgctgggaattgaaccaggacctcacatgtaagagttctaccactgctgggcgtttaatcccagcactctggaggcagaggcaggtggatctctgtgagttcaaggccagcctggtctacagagagagttccaggataggctccaaaatcttgtctcaataaaacaaaacaaaacaaaacaaaaacaaagagttctaccactgagctataacaatagcttttactttttgtcttgagttttttgtttttctttttgagacaaagtctcattgtatagccctcagtctgacccggaattcactatgtagaccaggctggcctgtaactcagagatccacctgcctctgcctcctgagtgcttccttttttttttaattgaaagaaaaattttttataccagatattctattctgattacaatttcccctcccccagttcttcccagatcttccccacagaccaaactccatgtcctttctttctttctttctttagaaaacaaacaggcaaacaaataaacaaacaaacaaacaagacaaaacaaagcttgagacagggtttctcaccgacctggagttcaccaaataggctaaaccctaggaaacatcctgcctctacctccctagcactgactgggattacaaatatgcacaaccatgcctggctttaaaaacaaaacaaaacatgagttcttcgactgcactcgggtcctatgtctgtgtagaaagcactttactgagtttttgctttaggttttttgttttgttgttttttggtttttttttttttttgagacagggtctcattattcgtagttcaggctagactctaacttgtagtgatcctcctgtctccacccctcaagtgcttagatcacaggcatgttggtatactcaactaatgtttaggctcttaagtgctaagctatctctcccattctttgccatagctttatagtatctaagttatgttaagagaaccaatagcaattagaactcttctattagagtcatagaagaatatgacattagcatgggccattccccgaagctggtgaaaattgatacatggtgaataacattgccttttagaaattacacgaatgaaaccacagaagattaatgaaaccacagaagattaagcaaacagcaccacagatacacttgaccatcagtgggtgtcaatcaagcagctgagtatgtgggatgctgagaagcataaacacccatcagactattcacagtaccctacaaacagtcacaagaaatgagcctgactgtagttccatcagcaaaccccatctgttgtgatatgccacatctcagtagcctggctgaggcaaacccagcacagtacaggaagccagaggcctggagttggctgctcacatagcacaggctgttctctacttagaggcaactgtgagtcatctggcttcccagcccgggatgaaatctccctccagaacagcccccttcacacttagatttcgtggtctccaagtaatctttcatttacttggtttgctatatgctttggggaaaaaaaaaaaaaaaactggattgagtgagcatatagggaccctggtgaaggtgagaaatagcccgttgcaaacctataagctagattctccaccccccacagtgctggggatggatcctaagccttgtgtaaactagctaccactgagttacactcccagtttgttttgtttaggatctgatctcacaatgtaatgcacactgaacttggactcaaatcctaagatctctgcctccagagtgctggggtaagagacacgaagcacaatgcctggctagaatgtttatacatcaaggtctaggactgtgttaactacaagccaggacctttgagaaagggagctctggcaaaccctgagccagagttcaaggtcaatgcgtctggatctcactcttggggaggtggatctctacagggttcagtccagcctagtctgcttgaggtgtagattaaaacatagctaactcctgcaggctccagtggatattttcaatgcaatggtcacacagatggcccctgcttaaactaaatcagtcactgaacaaaaccaaaaagcatgaacttgggaaaggaataggagacaagagggaggttgatagggtgggaaggaaacaagagaaggtatggggagaaagagactagaatatatcatatacagtatgaatctgttaaaatccttaatttcttaaaacttaagaacagccaagggccaggtggtagtggcacacgcctttaatgccagcactctgagacaggcagatctttgtgagtttgggaccgccctggtctacaaagctacagagaaaccctgtcttgaaaaacagaaggaggaggagaaggaggaagaggaggaggaggaggaggaggagaaggaggaggaggaggaggaggaggaggaaaggagccaagtgtggtggcacacacatttaaactcagcactctggaggcagaggcaggtgggaatctctgtgagttccaggataacctggtccacctaggaaattccaggacagccagggatatgtagagagaccctgtctcaaaacaaaacaaaatgaagaactaattggagccaggcttcatactgtatagtcccagaacttgggagacaatggcaaaaagattactgtaagtctgagtccagctgggttacacattgagtactggacagctaggaatacagtagaaagaaaaggagaaagaaggccgggcgttggtggcgcacgcctttaatcccagcactcgggaggcagaggcaggtggatctctgtgagttcgaggccagcctggtctccaaagcgattgccaggataggctccaaagctaaacagagaaaccctgtctcgaaaccccccccccaaaaaaaagaaagaaagaaaagagaaagaaagaaagaaagaaagaaagaaagaaagaaagaaagaaagaaaagaaggaggaagggaggtgttagtgttcaggcatctgcactggcctgtccttggtgttctgacaggatacaccctcagctgcagccactaagagcaccacctgtgcacattcactacctttcccttttaaaagggccctacccacctcccatctttctctctttctcccccacctcgttcctctctcctgctgctcccatcctcgaggcgggtctcccgccccctttcccttacaaaaccccccctgcttgaacccggtctcatggcgtctttctctctggatccacatttcttaaattacaacattggatccctgaccaagaaggctctcatggcctctcctcctgcccgcaggcagattgaggcacgccaggaccctggaacccagttcacataggacagcctcgcttctgggatcgcagggtccttccatccaaaatcgtcatgattggtgagccattccaccttccccaccttaggctattcccacgagggaggacacctctcgtctctcgagcatggtttctcgccttttgggctcaagttctggtacaaggcaaccaaccaccctttgcgtgacgatccaactggtggcctgtgccagtctctgaccatctggtccttccaccctgccccttgattttcgaatcaagacggcttgtgcctttctcgctggatacttgcttgataaaagccatgggatcgctcatgtggaaaacgcctaccaaaaatcagcttcccagcctttgtaatcacttcatgctgggaccccacccgcctgcttcaccttcaatagatctgctctcttccacctacaacaaatctcctttctcatttgctgatggctttgccttccattcaataccaacaattggtctctggtggggttatccacttctgaccattccccgggatgtgatgcttcctttctcaagcacagtcctttccttaacttctggcttttctcaaagtcctggtaccaggtgactgtgtgtctcgggctcagagccttggaccccacccttaaatgaccactcaatggtgggggtgctgtgcctgtctccaaatccaccctctctaaattcctgggatgctagaaattgaagacccttgggtcttatttctctgcctcactcatgggagctgggtcatcatctatacctccttgctcatattgggatgattttggagacccactgaccgttcctaatcagctattgttgcaggattaccagctgttgcccatagagctggaggcacaagacgaccaaacaagtccaggtgatgctgtggggatggggaagcatcaggtgctctaagccctgggagttgatttagatccaccaagaatggcattttgccaagtccagggagtggggggaccgtgagagttccacagagcctggacagtcaagtgaaacagccagctactccaggacatggctagtaccccagctttcccaggtcccccaaagatcaacgatggccccagctcagcaggaattagtcttgagaacaggacatcctcatcccttcctcacctgctatccctttctaatgccttatctttttataataaatgaaaagggaagaatgttagtattcatgcatctgtactgcctgcctttggggttctgacaggacacgccctcagctgctgccgctaagagcaccacctgtagacattcactatgtttcctttaaaagcgccctgcccacctcccatccttctttctctccctgtctctccctctctcctctcccccccactctcctctcttctgatgctcccttccccggaggctggtctcccactcccctttgcctttgttatgattcctttccttaataaaaatcccctctgcttaaaccctgtcacaaagcatctttctcatgccacttttcttaaattacaacaggagggagggaggaaggcagggattatgacagatatgtcctactttgcgtttgtcccctcccatttcagggcaacagtttctagacaggtaggaatatcattccttaactagtcttgcctggagtgtctcctcaatgtgtgcagtgccaacaggtcagataactgcagcaattctgcactagcgaagatatttgtctggttccttaagctgaaaatatgtcgtttccttttcacgtcttcacagaatcttgtttccaaattatccctgtttacactttaaagtgtgcaggacaatacactttatttttgtttgcaattatgtggtaagaattattcattttggccaggcagtggtggtgctggcacacgactttgatcccagaacttgggaagcaggggcaggaggatctttgttttgatttcaaggccagcctggtctcaaagccagttccagtacagctggagctacacaaagaaaccctgtctcaaaaaaattttttttctttttctttctgtctttttggtggtggtgaaccaatgagtttaattagggtgactttatatataggaacatggatgccttgctaacagctgcactctcccacctccagcaaccatgatcctcaggaaggggtgtagtcttgtggtcacccccttgcccttgatgattgcctgtcaatggacctgatcttgggcaggagtcagagtttgagaggccactgtatgatcagagcagcacattctacagcattctgccctttctcctgccctttcattctttcagccactaattaatttttcttctatctaaattttttgttttgttttgagactgggtttctggctgtcctggaacccactctgtagaccaggctggccttgaactcggagatctacctgcctctgcctcctgactgctgggactaaagtgtgcaacactaggtctggctaaaaacttttttttttactaattcatgtttttttcttcctagagaacaaatgagaggctggaccttgggatccttggtgattgtctgggttagccaaaaattacacacaattctgatcaacaatcttgtcgttgaaacaattctgattggtagaattataaagtcccttaagaagctacctaatctatgatttgtatatgaaattaaacattaaatggctttaacttcgaaatcaatggctaagctgggtgcagtgatgcacacctgtaacacacttggccgctaaggcaggggaatcacttgagcctaggaattaaaggacagcttgagcaacatggtgagacccatgtctagaaaggatgacaaggagaaagaaaaatgaggaagaggaggagggaaaggagaaatagaaaagtaaacaacaaaaataaccatgagaatgaaagacccccgaagaggtactttcgtagagggagacccgcacccaggaatcagcgagaccacgaacttggatgcaaactgcaagaggctttattggagatacaggtacccgggcgacttagcttctgtgaggccaagcgccccaagccaagggaaaggggtccttatatagggaaaaaggcgcaagctaggagcagggattctattggataattctaatgaggcattgtacagagctattcccattggtcaatgtaaatgaggcgctatacagggttattcaaatgaggcgcagtacagagttattcaaatgaggtgaaacacagagtctttcaaatgaggcgaaatacagaatcatttctattggatggttcaaatgagacacagagccattccagatcagcatattctcaaggtctggtgtctggtacaacagactcaattcccccccccctctgcgttcagatggctgaccttgggggcagagaccttgggatggagtgtttctcatcgggcgggggctcaggggcagggctccaggccggcccacctggtgctcgccctcgtgccggcccacctggtactcgttctcgggccgggcgtgcagcgggtggcgggggaagtggaggccaccgggggtggggatcggggaagccgccgacaggaggaagaggagacaaacttgagaaagggctaaggggcaggggtctttcaagaagatgtggaagacaaatgaagggttggggctgtagctcaggggtaaaatgcttgcctgggatgcatgggtactgggtttaggtcaaaaccaccacaaaataagtaaatgtgcagataatatggtatggaatatggcctcacatttattagaacagtcagccaagtgtccttagtccgcctgcctccacaccgccttctctgtgtgtaagggttttgtttttaaactagactgttcttacatagcccaggtcagcttgataagactcctgcctcagccttctgagggtcctgaccacagatgtgtgccgccttgcctagccccctgcactagatggctctaattaggcactcaataacaaccgatgctatgggctcagggtttactaaaactgttacacttaatccttacagcagatgaggaagcccagccttgaaggccccagcactggaggtcaggattcaaacttacatctttttcatctcaattcagtgctttttatgatgcttcccaaagtgttttctgtcattgcaggaagggctgggtctattgcatttgtgttacagatctgatgtagaatatgacctaactcactttggctggtcctaacccatggacctctgatcgtctggggagacagagggtacctgaagctaggaaataaatactgttttaagatctgctctctggccgggtgttggtggaaaaaaaaaaaatctgctctccaagctgggcagtggcggtgcacgcctttaaccccagcacttggcaggcagaggcaggtgggtctctgagtttgaggccaacctgatctacagagtgaactccagtacagccaggacccagaactgttacacagagaatccctgtctggaaaccacccccccaaaaaaagatctgctctccagaaagtgggcagaggtttgtagtgtgtccaaaaagataccaaagggaaggaatgagtctcactaaaagccaccagaggcccttggctcttcaggacttgtcccacagtggtccattgaatagcttaatgaggttcagtcggcatagcataaggtttgtagatgggttgaacttaacacgtagtctgcagatttcctcccttaccctatttgctctttaatgttccggcagcttgttcccattacgtagtgggtctgcatttcactctttgaaaccttgggagtttcagactgcaagattcttctttcttaaacccttcaacactggaacagggagagacaaccattccttcccccaagcttctgcatctctctccaccctccttttctggagtttgtttcccattgtctgcccttctcagcttctttactaaatattaagtggagctgggcgctaaggatataagctaattggtggcatgaaaccccggtgccagtgtgaacaacaaaaccccaaacaaaccatcctcaaacaagacaactctttaaaaacctgtgtgtgagctgggctgtggtgactcatgcctttaaacccagcacttgagaggcagaggcaggtggatctctgagttcaaggccaggctggtctatggagcaagttccacggcagttgggctacatagaggaaaaaaagctgtctcaaaaaatgaaagaaagtgtgcgtgtgcgtgagagagagagagagagagagagagagaagactaagactcaatagtattaaaataagttcaagaggtaaaagaggccttagtacaagatggtatgttttaaaatggatgacttgatttcctatgtgggctattagacagttctcgtttctttcttccttcttcttcccttcttcttcctctctctctctctctctctctctctctctctctctctctctctctggctttcggagacagggtttctctgtgtaacaactctggctgccctgggactcactttgtagaccaggctggccttgaactcacagagatcttcctgcctctgtctcccagtgctgggattaaaggcatgtgccaccaccacctggctccatcattttctcattgcatttttccttactctaggttccttagaggcagagttttccaggaagtaaaggatttgcaatgaataaaccagacttataacccaccattgcctcaaagaaacataactaccaggtctcctctgagacctcatgtgactgtgatttgaggcaaccatgagtgtgaggagagagataagtgctgggggctggtgtgatggctcagtgaagaaagcctcagcttgagtttgatcccagaatcccacatggcagaagaaaagaatagactcctaaaagttaccctccaactccacacattggcatatgacacacacacaccacacacacacattaccttagttagggctactattgcttcgatgaaacaccatgactgaaagcaacttggggaggaaagggcttatctgacctacattttcacagcactgttcatcattacagaaagtcagattgggaactcaaaacaaggcaggaacctagaggcaggagctgatgcagaggccatggtggggtgctgcttttatgggcttgctctcatcatggcttgctcaacctgctatcttctagaaccagcccaaagttaacaccactcaccatgggctgggtcctccctcatcaattgctaattaagaaaatattcaaagttgggtggtggtggcgaacacctttaatcccagcacttgaaaggcagagacaggcagatctctgtgagcttgaggccagcctgtccaggacagcctccaaagccacagagaaacctcgtttcgaaaaccaaaaaaaaaaaaaaaaaaaaaaaaaattccataggtttacttacagcccccccctttttttttttaattcaagatagggtttctctgtgtagctttggagcctgtctggcactcactctgtagaccaggttaacctgaactcatagagatctgcctgcctctgcctcctaggtgctggaatcaaaggtgtgccccaccaccgcctggctctatagccaaatatcatggagatattttctcagttggggtttcctcttttaggtgactagcttgaatcaagatatgaaactaaccgacacacacatacaaaataaacttttattttttgaaaataacagtgaaattcttttattatatatactcaacatatggtagtaaaacattgcaagtaaaaaataaatagtatctcactgatttaattgcttaattcctttcttgtttactacatataacaaaaggcttaggccaggcgttggtggcgcacacctttaatcccagcacttgggaggaagaggcaggtggatctctgtgagttcgaggccagcctggtctccagagcgagtgccaggataggctccaaagctacacagagaaaccctgtctcgaaaaaccaaaaaacaaaaaaacaaaaagacttatttcatgtattagttgtatattagaatttgctgttttctaagatacaaaataaacttttaaaaatgtaaaagtgataatggtaaaagatgggctgagtgtggggtccatagcagagtgcctctctagcatcctgggtcccctctcaagcacttataaaagcaaagcaaaaaaaatgcaacaatatttgcacaatctacagtttagttattaatttttaggagacgaagtcccactctattactctggtgacacccagactctggggctctaagggtcctttggtctcagtgtcctgaacagttagggccacatgcatatgctaccagaaaaatgctcaaaactgggagatggtgtgacagaaagggagaacaaaccattttcagaatcaattgggccgggcgttggtggtgcacgcctttaatcccagcacagcactggggaggcagaggcaggcggatctgagtttgaggccagcctggtctacaaagtgagttccaagacagccagagctgttacacatggaatcctgtctggaaaaataataaaacaaaagaattgattggttttggtaccgtgttgatgacaggttattatccatgtttggaaaaggaaatttaaaaaaggaaataaaatttacttttctttgcagtttatatccatcctaacatttttttagatacataaagtctatattttgatgacaaaaattacattgtctttaaaaactgaattaggggctgacaagatggcttagcaggcaaaggtgtttgccaccagtcctgacaacttgaatttaatccctggaacccacatggctggaaggagaaaactgactttcacaagtttttctctgatacacacacacacacacacacacacacaaatcctttttaggtcaagggctgggaatttggctcagttggtagagtgcttgcctaacacatgagaacgcatgtgaagtcttccttgacttcttgggtttgatcctaagcaccacagaggctggtggtatacctctgtgatcttagttagcactcaggagacagaggctgactaatcagaaattcaaggtcatcctatgctatgtgtgttctagaccaccttaggctataaccctaacaaaaacaaaacaaaacatgctagattaaaatggatgttgtggcatgcctgtgatgtttttaactcaagaggttgaggcaggaggatgagcctaggctgtatagtaagttattactaactagctcttacaacttaaatgaagccatttctattaatctatgtgcttccctgaagctcctggcttttacctctcctgcatgtcttgcttcctctgtctccatggcaatgcctctgactctgcccttcttcccaccattctctctgccctggaaatcctgcctagctatcagccaatcagcttttattaacagtgagagcagcatgttttcacagtatacagaaggattattctgcagcacacgtccgcagccagagatggcattgaatcacctcccattggagctgcacaaggttgtgtgagctgctaagcgagtgcagagaaccaaatccaggtcctctgcaaaagcagcaagtgctgttaacctccaagccagctctctagcccagaagaaacatttttgtcactagaggtgggaattcaaggaatcaaaaaatctatataaagactccttcagcctttgaatgttttaattattttcccactatcaccactctatttagtctacctcaagcatttattctgcttttttttgttttggccccgttaaccccccatgtcaaatgaattcatagatccagctggaaattccaagaatggaatgaatgacaaagttttggttccctgatactgccaggtaatactcagttggttgtttgccctggaagcaagaggaccccaagacctgagtttgatcgaagtacccacgtaaaagctatgcctgtaatcccagcactgggaggcagagacaggatccctgggacttgctggccagtcggtccctttgcgtgtgtgtgtgtgtgtgtgtgtgtgtgtgtgtacataagtgaaagggtccttggaggcctgaggtctctgattctcctggagctagagttgcaggatctggagctcatgacacagtgaggagaaactggatcctcttcactaggctctgagacatcttatgtgctttttgttttgaatggtattgatatttgctcatcatgaaatgattactttagctggtcatttcaacattatgataaatgcaacatggaacaagaaaaaggggattcattgctcaccctgtgaattgttacttagggcaaaatccagggtggattttgtgacccatattctcttaaaaaaaatgatgaaaatgtaacttagaaaaaagagtaaataccattatctttattttagtcagagcagctctatttttcttgttaataataaacagtgccttctctattactttgccaaacaaatggagctcaattcacaccacatcaatgaggttctaagttctttgaaataagacggctgtcagtcactcccaggacagagggctgaaatagaatcagtttcttgaataaaatgcttccatggaggcactggggcctggactagctattgctgttttctaggccattcagctttatcctgacatgtggttacacgggcgaaaagggagcgaattagtacctgctcactttcaatctttgccacaatcctgcagatgatcttttcttggctgagaaacagtctcagaaagagaagcaatccaattaaaagcatgtcgacagaagcaatgagaagaactaaaacataatcatattcttttttgtttttctttgttcagaactgggcactggcccgagggtcttgaacatgccaggcctgtcaagatacactcagccctttaaccctttaaaaaatcattctatttggtttttttgtttttttttttttttttttttttttttttttttgatttttcgagacagggtttctctgtgtagctttggagcctatcctggccctcactctggagaccaggctggcctcaaactcacagagatccgcctgcctttgcctcccgagtgttgggattaaaggtgtgcaccaccaatgcccggctctatttgtttctttagacagggtctcaactgtacttcaggccatcctggaacctaggatgacctcaaaccaatggcaatcctcctgcctcagactcccatttgctggggctctagacataagccattacttctggcttccaagccttttttgaacttttgagtttttaagatcatgctcactaaattgtccaagctagactggaactcactcatagctcacatacaactctaatttgatatcgtactgcctcagcctcctgagaggctggaactacagacaaatgtcaacaggcccagggttcatgttcttacttccaaaaggagaacactttgtagctgtatttaccccaaacctattctgtgacccaccaatgagacaaggtctacccgaagtataaatggacatcacagtcaaataattttgataaatgccaggcatgtcaaagacagtgaggtgttatgtaaaagaaatgcttaatttatttaatcagcttttctacagtcgatgttaactactgagcctatgtttttctctttacacttgacatttactactgtctttggaaactaattaaaataatctggtatttgcttaaatgaatgaaagaccaagaaaaagctggagagctttacattggaaattaaggttacaaagtatataaagtaattatggttaaaaaagtagcaaggaagcattttcaaaagatacagtctgtgctcctggggtagctgggggaaggggttggtgggtgggtggagagagtcagaggcaaaaagggaaacaggcatgaaataatgcagcacatttccaatgcaagtttttagttacgtgggttgaaatgacaggattcgccatgggaaggaaaacttgagctggccaaacagggatattcaagttcagatgcaaggctaggtgcgatggtgacatattcctgtagtaagtggacagaggccaggaggatcctaagctcaagatcagtctggacaattagcaagaatgtctcaaaaaacaaacaagggtgtagtccggtgtttgtctagcattttcgaagccctgagttcaatccctagcagcacataaaacctgcagatctaagcaatagtgtagaggctaccttaaatgcccttccctataatgagattggtgactaccttaaatgccattctagagctttcatccagtagctgatggaagcagaagcagagatccacagccaagcactgaggcaaaaatcctggaatccagctgtagagagggaggagtgatgaacaaagggatcaagaccatgctgaggaaacccacagaaacagctgacctgagcaagtgggagctcacagattccagacagctggggaaccaacataggaccaaaccaggccccctgaatgtgggtgtcagttgggagacctgggcagtctatggggctgctggcagtggaaccagtatttatccttagtgcaggaatggattttgggagcccatttcctatggagggctactctctcagcctagacacatgggggagggcctaagtcctgccccaaatgatgtgacagactttgatgatcctccatggaggggggcatgagaggatgggagggagaggaaactgggattggcatgtaaaataagattgttatatatatatatatatatataatatatatatatatatatctgcagtggtacacactgaaagacccccccagacccctaaggggcacagagtcccgaggagcccccaagactcagaaaccagaccaagagctgcaaaagcaagaggttttattgaatgaatgcgcattcgggtgtcagcaatatcggggaagctgcacaccccagcatggggtgcaagctccttatataggaaaaaaaccgcagatcagcatacaggcaaggggcacaaagtgattgattacaaactatgatctcatgttagagtggtcacccaggtgtgacctacttttctacaaaggaaaaaaccacagaacgtaccctggaaagtccttgattgttggccagccaggtgtgacccaaagagggttgtcttggcgatcgcccccgtgtaaaccatgggatgtgcccggggttggcacatttccttgtaatgggccaaggcctgtggggaactttttctctctgtgaactaaaatcttttaaaattttttctctcagcaaactaaaatctttcaacaccaataattccagtttgcaggaggtgggggcggggagatgagcagcttaaggccatcccaggctacattaggagatagagtctatgaggtaggatataattaagtggtagaaaataaaataaaatggggagggaaaaggatgcacaaagcaaaacccatttgagaaaagagcaaagaaattattatcaggaagtttgtagggaaataggacagacatggttgattcagctatttgcttagtcaatcaaaggaaaaacaatcagtctgtgagtaatgatggaagaaaagactaagatctgaaagactgtgtattggtcaggtattagatatgatgggacacagttttgaattttacagtctaaagggattttaactattttaatttttatatgtgtaagtatttttgcctgcatgtatgtatgtgtactacatgggtgcctggtgccagtggaagtcagaaaagagtgttggatccctggaactggaattacagaccgtgagccaccctgtgggtgctagaaatccaattctggtcctctacttcccctaccctggggacttttgataatgttaataaatgtcactctaaagaatcagtcagaccgatgggtggtgttggcacacacctttaatcccagcactcgggaggcagaggcaggcgggtctctctgagttcaagagaccagcctggtctacaatagctagttccagtacaagcctccaaagccacagagaaatcctgtgctgaaaaacaacaaaacaaaacaaaacaaacaaacaaaagcagggcggtggtggtgcatgcctttatccccagcactgtgagttcaaggccagcctagtctacaaagctatgcagagaaatcctgtgttgaaaaaccaataaataaataaataatcagttcttcacttaagtcccctttgctctgcagaagtttgacagctaaagcccagaaaggtcacctgatttccctgtcacacagtttactagcagaattcctgggctgaaaatctttgtcttcttactattgagaagtctaactctcaaggaaattggctccaaaggatggaaatgtagactgtagaagatggcaaggacagaaactaacatgtatgtaggacaaagggatgttttctgtttgaagagtctatttaatggggctcagagggagtagacgtcttgagttcaatccctagcaccaaatgaaaaaatcacttcataagaaagagggctggggtgtgtgtggctcagttggtagagtatttgtttagtattcatgaagccatgaatttgatctcagaaccccctaaaactgggaatggggtgcatacctttaatcccagcacggggatcaagaccagtggtatacatgagagagccttaacacaacccattcatcaccggcaaaacaaaaccagatcacagttcttactgtgaaaagtcatcctcttcaactttgtcctgccacaatttagaatattaccttgtgcaaacaagcaccaagcccttgtagcttgctgtgaataaggaaaattcatagattaaaaaatattacatttgaaagaggcagctttatctcaagcatgtagggagaaagttagaaagatgggttttactgattaaaacagctcactaatatcttctccctctgtctttcctgatttctcttttttgtttgtttgtttcagatagggtctctccatgtaaccctggagcttgctatatagagcacactgaccttgaatacactgagatcttcctgattgtctgagttctctacctccttatactcctctatttgcaactcaatattaaagatgtgttgcatacttgtttgaaaagtatttggtgctaggagtatctcaaggagagatactgataatctacagaagaaatccctgagacgagcccccaaaatgatacagcctagaaatgattgagttcgttttcactgtcagttaaagaatcaaaatgtgacaaggtttttaatcccagcactcgggaggcagaggcagacagatctctgagtttgagaacagcccaagagagttccaagactgtcagtgctgttacagagagaaaccctgtcacggaaaataaatacatatacaattagttaaaaaagaaagaagagagagaattaaaaggtaaagtgcgaagcagagttgggactagggaagctgaaaaaaatccagtctcttcttgatgcctgggggtttaaagcctctattgagtcttcctccctagggctgatcagtttaaagacagacatgatggttgactgaccccacactattggggacgtgtcctgaccaggccttgaacttattgaaccaatccatcagcagggggcctgctggtgggagacaaagctgccaggcttttgtctcaagtcaggcggctcaggaagaagctggctatcttggaaattcgctacagtccttctccctatctgtgtgcctgccagggagtttgtctaattcctggtctctcaacactagcaaatcaaaaaggtaacatgggcttggcgtaatggtacccagagcttcgcgcatgccaagcacgtgctctgtcagcagagaaaacacccaggttcagatgacaaaagatttaagctaggcggcgtgagcacacttaaacgcttctcaagtctgggacacgctttttccttgaaaagccagagcacagaacagaaaacacagaggcgagcatagcaggcaaagaggaaagattatcgcttgacggccagaaggaaccgcccccagaataccccggccctgagcttggcgaagcctgcccctccccgcgccacgcccagcgcgcaaagcaccgtgggactggtagtctctctcccaatcggcgcttaggaggcggggagagcctgctgtacgtaccagaacctttcttccttcccaaagcagtgtccctagtctccctttccgccaggcctactagggaaagtttgaaaattcccgcggagtcggcgcccgaggccggaaccctcgcgagaagttcgagccccgcaagcgcgatctgcgctcggctccccgccctggccgcgatccttccctcggcggaaaggctgtgtgtggggctcgggcagcgcgcccggggtagtgcgcagagcgcggcccgcgcagtgccagcccagtaagtcgagtcgcccgcggggaggacgcggcgcgggcagcggccgagttcgaagccgggattgggcgtccgggcgaaggcgcccccggggcctgaggggaccggcgagtggctgagcgaggagcggcttccgcgggcgggggcgcgcgccgcccgcgccgcgccgggccgagccgggtctcccgggagatgctgtgacggaccgtcggcacggaagcaaccgcagcagcagcaggagcagcagcagccgcagcagcagcagcagcagcaggcgccgcggctccggcggcctggccgcgggctcaggtagcgtggggagccgccggcccgcgcgccgagggcggggcggggcgggcggcgaggcccgtggcctaggccgggcgctccgccgcgcggggaagcggcgtccgcgagctgcggcgaccggtgcggctcgttccagcgctcgggcgttagttacataaccccggcggcgggcgcaggcacatggcggcagaggcgctcctccgcgctcatcgcccgcgcccgcgggccgcgtctcggccccccggggcgggcctgactcgagaccccgacccgtcgtggtgtagcggagcgatggagaccctggtggggcgttccccgcgggcagccgctggctccctgagtctttcctacgtcggcgtgtgctccacatggtcctgtgcttggcccgggtgagtgagccagtcctgggcggggagaaagtttgactcgcggcggcgggtcgtgcgggccaccgcagtgaatggatcccggacggagcctttaggatgaccgtgtcaagagctcttctgagaggtttggggcgatggccttcgcctttggttgacttttttttttgcgggggggggtgtctgttgttgtatttgattttggaattgataggcaggtagacgcggtctgtttgagacagtacagatggtttttgtcgactttgtggaacggttcccccttggtacagtggaggatggcatccaggtcttcttcacacattccgggcaagcgctctaccactgtgtcccagcatgggatcggttgctttttggttttcgaaacgaacggttttcattagagagaggtgtgttgttgtaggaaagtgagcgttgttattttttgtttatttttgatgccagtgatcgaggcccccacctcgcgcgtggtgagcacgcgctccaccacctagcactactccaagccgctggtttttttttttttttttctttttaaatagatagttggagacgtatttcaaagaacgtgggttctttagaacaaaacacagtttggttcttgatagctcaaagaatccgtgggctttaagaactgtctttggtgagctttaactgtcagcttcatggaagacagaagttgttggggtaagtttacttacttcgtgtggtgatgacaaatgctatgtgaagactatattctgtgacttattttgtatttttggtggttaggtctagagcctcacactgttaggcgagggaactaccattgaactactctctttacttttttccctttttagagacagttaaagcactatgtagcccaggcagttcttgaatttgcactcccctggcctcagcccgagaaatagttgggattacagtggtgaggcacatagtaacttagtatttaaatgttaccaatttgtaaggcaacctaattattttgtaaacatttaaagtggggcatagatcttcacttaaataaaacattgcctttttagatcctaacttcataactttacagtgactccaagaatgaagtgttctctccttcaggttagcctaaagatctgtctgttccatcaagccttacctcacagattttctgtttcggccatacagaatcagcaccagttctgggctcacattggtgaaaaaaggtgtttgacatttccaggctcatcttcagtttggcatgccagattttttaaattcttaaatttcaaatccctagtactaccctttgtgcttttttttttttaaatctgttactttcacagcatatgtatctctattgtagtgtttattcttgtgtctgatagtgtgattatgaatgtgctcttctagaatataaacttctggaggtcagagtgtacatctctgtccttggattctactttcccagcacagtgttttaaaagtagatagctaggaatggtggtacatgcctgtaatcatagcacttggaaaatggaggcacaaaacttagggagttcaagaccagcctgggcttcatgaaatcctgtctgaaaacaaaaactaaacaaaaagtaaagcagtgtatcatttatttgggttgaaactgaaagaattggcccacttgtttttagatcagatagttattggatagctaggtttggagttctgtctttggtggtggacttcagttatttcgggaatgtagatattttacttcaaaaactggtttatggtattttaaatttcttagattttttgggggtttggggggcggggtggttcaagacaaggtttctcagtgtaacagtcctagctgtcctggaactcattctgtaaaggaagctgtagactcacagagatctgcctgcctctgcttcccaagtgctaggattaaaggagtgtgccaccactgcccagcaaccttataaaatttgttcttcataataaaatggtgatacttaaaagtaaaagaagctgaaaattgagtggttttacatcttaaaatttattgtggaagtgtgtgatggtacatacctttaatcccagtgctcaggaggatgtcaaagagtttgaggccagtttgttttacaaagcaagttctttctccccttttagtttaattatacatagtaggctgcttcaggttggattttaatccaacctgcccagtcttttcctctcttattacttcctgttgtgagtcttggaattcatgaatcttgactgtgtatccaactggtgtacttaacccccctctgtattaacttagtcttgctagtgattttttttttttttttttttttttttgcttctataccttttgaacattgaggctattgctgaagcaataaccttgtatagtaattctgacagcataggcttgcattaaagtctgttagctctgagctttatttctagctgaggtcttgtaatacatccctagctggtctagaacttaccatgtaggccaggctggcctggaagttgtggttatcttcctccctttacctccgaaataccaagattataggtctgtgacactatgtctagctgtctctttggaactcagagtgtattaaacaagatagagtcactaggactagatttgatagttaatattcaagaccagagccagagtgactctcagaactcctattgttcatccccccttgcccctgccctttctgcttttcatctcaaccattcagaaggatgcttttatatttaaccagaattctagaatttttggtttattttaggtgtatgggcgttttgcccgtgtgtgtgtgtgtatgtgtgaaccacacatatgtcacatgcctggtgtctgtggaagtcagaagaaggcattggattccctggaacttatcttggtggctgtaagccaccatgtggatattgagagacaaccttatatgtcaccccacaaagcaacaagtgttcttaatcactgagccatctctcagccctactttttggttatttacaacagaagtcatgaagggactttaggtcttataagaaattaaaaataatttagattttttttcctttctatctagtaaaagataggtatcccattcaagttttgaagtttctggggaatctgtatattacagagtttctcctttttttttttccttctgaaaagtcacctttttcagggttgaaaatgttagttcagaagtactgggttcaattcccagcatacaaaaaggaaaaagaaagaagtgtggaaaagaggtgactcctaaaataggattgtgccctgtttacctgtctgctgctgttctctgaaggttgggcaatgattacacaaagcatttcacagaatatgggagtgaaaggtatcctcaggacttctggcttcctgaatattccctaaggctgcttgaaagaaatactttcttaggaaatagtatatgtcagacccatatgtacaaacttattttacttcatttacttttgtatgtgacttgctttccctcacattcctctgactagaaatagtgaagtatactattcaatagaacagataatcatactaattttatttttaaaaatatttgcagtggaagtatgcaagacttaacagctcaagtgacgagtgagctcctgcatttccctgaagtgacaattgaagctcttggagaagatgagataacattagagtccgtgcttcgtggaaagtttgctgcaggtaaataaccttgctgaagatgcatgaatctgggagttagagctcagtggtaaagcatttgttgcctggccctcctcctcatgtgtccagtttagggtctattcttaattattttttattcataatctacccatcaataagcaaatcctattctctctatatgatgaaactcttagtccattcttttcacagtcacctgctaatatctttcactatgtctactctgctttcttgtccatcttttgcttagtggctgagtaacattaaacaaattagattgttatttacctgctttggactgcctagtgactagagacagaagagtacaatttgaacaggattgggagacagggattctgatactttttgttgttaaattcttatatcttatctcctaagctcataaactccacagctcaagtcttatagttcttactgacactgaagtgttgggttttccaaggtgtgccacaatacctggtgttgggatctacttgaatatactggtgttcactttgtaactatgtgattttagataagttaaagtgcattaaactttaggttattttatgttctactgagctgtgtaagaagtaaataaaaggatgaattttgccttcatatggtctctttactgcagttttactgctgtagttactcttcattttatttatttatagaggatcgctctgctagtctataaatgctttgttttcaattcaagagtgatttgtaattgtatgaggaattaagtattcatatataaaagagctgattactagatttgttatgttgcagtgattttgattttttttttttcttcaatagggaaaaatggactagcatgcttagcttgtggaccacaacttgaagtggtaaactctctatcaggagagcggttgtctgcatatcgattcagcggagtaaatgaacagcctcctgtagttcttgcagtgaaagaattctcttggcataagagaactggattgttagtaggattggaagaagcagacgggagcgtcctgtgtctttatgaccttggtatatcaagagtagtcaaagctgttgttcttcctggaagggtatgtactatttaagataccttgatagttttgcttttttaagctgaaagcttacaagatatgtttaccttaaaaactcattgaattgtacacttaacaattaatgtgttttcatgtaattattaccttcaatataaagtacaaagtgtatttttatttagggttgtatgtgtgtatgcatgtatcacatgcttatatggaggtcagagggcaacttctgggactcgccctctccttgtacctttatatggaagggttccgggcatcaggttcaggctgtcaggcgtgtatcactgggcagcaagtagctttactatctgagccattttactcgcactttcagaaaatttaatttaagatgacgaggcatggtggtacacacatttaatccttactttgggaggtagagacaggtgggttttggcaagtctcatttgtgtagtaagttccaggtaagctagggctacacagtgagaccctatctttaaaaaacaattttttaaaaggtgattataagtcatttaaaagattttgaaatttaatgtgttataggtattttgcatacatgtatgtctgtatactatgtgcatgcagtaaccatagaggccataagaaggcattgaatctgctgaacctgaagttaaagatggctgttagttatcatttggatactgggaattgaaccttgcacctctggaggagcagccgttgctgttaatcactgggccatttcttcagccctgtttttaccccttttggtagaaaatataacaaacatcttgtctgaggaggtgtgcacattggctcttttactgttatgttatttggaaggtgtcttagttactgtcctattgctatgaagtatgactgaggcaactcttagaaaagaatctatttaatttaattgagggcttgcttaatccattataaacatggcagggagcatggtggagaaatatctgagctaacaactagatacatatatcctgatccacaagcagagagagagaacttcttatcctttcaaacagttctattccctggtgattaagcattgaaatagatgagtctatgggggccatttttactcaaaccaccacagaagtgtaaactaaaattttctggaacgattagtttatattggataattctaaagtggctgcttaagagttcttaaataaaactataggtttaagttgtatgcttaacaattttatgacttaaagtttgtgttcaaagcttcaatttcatctttaaacagataattgcatatagtttagtgtaaagattatataaacattaaatgagccaggttatagcaaatcactagcatagataataaacatcagttaattttcattttttattatgttggaataatagcataattttgtagtatatctgagtattcaccttttacttggattcatatagtcatgcaattgtgattttatataatgtttcagtcggtgcaagttactaacctgccttaatgtcaaatcttatttgttgtacagttggttgtatttcctcactttaggaaagctaatcttatatcctggttcctaggtaacagctattgagcctataattaatcatggaggagccagcgcaagcacccagcacttacatccaagtctgcgatggctttttggagtggcagccgtggtaactgacgttggacagatcctccttattgacttatgtttagatgacttgtcatgcagtcaaaacgaagtagaagcatcaggtaatttagttattcttcactgggaaacaaaaacaagcatttcagtgttggggttatggtatttttggttttggtttttccagagcagtgtttttcttttgtaaccctggatgttctggaactcactctgtagaccaggctcagagatctgcctttctgtgcctcctaagtgctgggattagaagtgttcaccctcacgacctggctatagattgttgttttttgttttgttttgatcaatcacttttttttttttttaaacatactaatcccaggccccatccccatccccaccccttcccatccgctcctcagagatggtaaggcctcccatgggaagtcagcaaagtctgtcccattaccaaatggaggcaggaccaagctccccctaggtgtgagcgaggtattccaccatagggaatgggctccaaaaaaccccttcatgtgctgaggataaaagatgctggtgccactgccagtgaccccacaaactgtccaagcgatccactgtcccctgcattcagggcatctagttcagtccagtgaaaattcccctgctgttgtccagagtcagtgagcttctttctgctggttcaggtcagctgtttgtgggtttctccagcgtggtcttgatccctttgctcatattatcactcctctctctcttggattggactctgggagcttggcccagtgattagttgtatctctgcatctgcttctatcagttactggatgaaggttctgtgctaacagttacagttagtcctggatcttattacaggggaaggccagttcaggcaccctctccactattgtttggagttttatctggggtcatccttgtgtattcctgggcatttccctagtgccaggtttcttgataattccataatggctcactctatcaagatatttctttccttgttctccccatctgtccttcgcccaacttgaccttcctgttccctcatgctgtccctcacttccctcctctctccctcgttcccatactcccagtttactctggagttcttgtctatttctccttcctccgtggatccatgtatgtctctcttagggtcctctttgttagctaggttctctggggttgtgcctgtaggctggttgtcctttgctttatgtctaatatccacttatgagtgagtacataccatatttgtctttctgggtctgggttacctctctcaggatggttttttcctagttccgtccatttgccttcagttttcaagatgccattgtttcttaccgataagatgagtagtcctccattgtatgaaagtaccacatttcatttcctttagccattctttggttgaggggcatctaagttgttttcaggagttggttctctcctaccttgtgggtcccaggaattgaactcaggtcattagtcttagtgtcagctgtcgtttatcaggtgagccatctcggcatgccccagtgtacacctttacatggagtctaggaattgaattattctggcccttacatagtttctttctttcttttttattcttcgagacagggtttctctatgtagttctggctgtcctggaactcagtttgtagaccaggctggccttgaactcagagatccgcctgcctctgtctcccgagtgctaggattaaaggcgtgtgtggcaccaccaccctgctcttagtttcttaacattacttgtcttttttattttagatcttgaagttattactggtatcccctcggaagtgccgcacatccgagagagggtgatgagggaagggcgccacctgtgtctccagttagtaagcccatcggggacagccgtttctactgtcagctacattagcaggacaaatcagcttgctgtggggttttctgatggctacctagcactttggaatatgaaaagcatgaaaagagagtaagtataattctttttcttttagttgatgactgatttcttttaaaatataatgtattatttgaaaactagtatgagaaatgacagaaaagttttattgaatcaatttatactttgataaggaacttgtcatgtgagtttaggttggttcttttggggtttatagtttgtcagagaatgaagattggaggctagtgtgaacagacctggatttatagtgtgccctagctcaaagagaagaaagagaaagggacattcaagtatggataaaatagatgtatagtaggaaatctctgtgggccctggctgcctgtaatttttttaaaagcaccaatttaagtgtacttggtaatttttatgctgtcaaaatttcccttaaatataatttaattgaaacttgtatggggataaaaacagcatataatacggaaggagatagcaaattaaacaccagattttaagccaagcattggtggcacacacctttaatcacagcactcaggaggcagaggcagccagatctctgagtttgaggccagcctttgtctacaaaagctacacagagaaaccctaccttgaaaaatcaaaataataataataataataatttaaaaaaacaccagattttagtttttagttaagaggtatgttaactaaaattaacattttaaattttcagtttatttctttatcttttttttttttttaattttatccccaggtattttgttatatttccttgggtattttatcttagaagcttttcctttctgttctattttattttatccttttattaactctgcttttgagttgctcctaaaacagcatctggaaaatgtttcattcacagtattgttttctctaacatttatttttggatttattatactttttaagctgtttatgcaaactccagtttcttactcatcacctttttttgtctctaatttttaagagagagagtgtgtgtgtgagagagagagtgtgtgtgtgtgtgtgtgtgtgtgtgtgtgtgtgtgtgtgtgtgtgtgtgtacatgtgccatagtgtgcataggactgttaggacaccatgtagatcccagggattgaattcaggctgtcaggcttggtagcatatgatttataggtaagccatctcataatccctcatttactgtttttatactagaaaattgacttaaacccagagagcagctagacatgggtaagtgccatcacgcttctagcactgaggagatggagacagaaggatggggggtttggtagcatcagccacctagcaaatctgagagcaacctgggtgtcatgagactctctgaagaagcaagtttttctgtctcttttactctttgaggaatgatacagtgtggtgtgtactcgtgtgattcttagaaactaggtatcacataagtatatgtataaacagtgtcttcttaacttgcatttttacaggaggcacttttttacctccaaagataaaattttaacttgaaaataagcagtgtattattttgtttgttttaggtattatacacagttagaaggtggaagggttcctgtctatgcggttgtttttcaagaacctgagaatgatcctcgtaattgctgttacttatgggctgttcagtccacacaagataggttagtatgcctgtggtttttagaacacatgtcatcaaggctgaggatatagcagtaaaggagtcaaagtggaacaatttgtttcttttgaaaagtttgaattggattaccactgccagatgttgggatggcatctcccctcatcctgtgtatgccttgcacatgattgatttggcgccttgcttcatgtccttgtcgtgaagtcccctttcttgtgtagggcttgatcttcctaggaaagagtgtggagggaaagggggcatgtctctgaagggatgctctaccatgggatgattctgttcatactcttattggccaggacttagtgtggtgcaaaggaaggtgagaaatgcagttgatatttttaggcagccatgtatataaaactaaaatccgctcattagaggaggaatatctgagaaagaatattgggggggaaaatggtagaatatgtcacatattgcattaattacattttgtacaaacaagaaaataatcttttgtacaactgaagtttgtcacatgcagtcagtgtgttagtgaaaaattgggaaggtaagaggtaaactccatgttttaggtcttgagtaatttctcttttctttcagtgaaggggatgttttgagtttgcatctgcttcagctggcatttggtgatagaaaatgcttggcttcaggccaaatcttatatgaggtaagtggttaattagaatattaccattttggggtttttgttttttgttttacattctttgctttatcatactgaagttattcttattcaaattaaaattatgtttatcacttagtgggatagatactaggctagtgagcacaagctttctattggttttcgcttgtttgccatttcagtgctctaaatttttctgggtatttcccccataatagagagactggactggattcatgtgtgtgacctaactgtaatacccaggagaaatgcttccagctttgttctaacatatcaagcagtgtacgccatggagaaaacgtcagggcatatgcatcagaatgctcagacagatgactgcttatttttctaaccagatttctaaaattagaggaatattactaatagctacattttctgaactctatagcaggttttttagaacttagtgttgagttatctggatgggttttaggggatttatgaactgtagtttccattatgaattttcctggggaacatctcagccttttgttagatcttaagggaatctatgattaagaaagaattctaagcctttaatcccagcaccaggcagaggcaggcagatctctctgacctcgaggccagctttgtctacatagtaagttccaaggcagccagagctacatagtgatctcctgtctcaaaaaggggggagggggtgttgttaaaaactattcttgttcattgagcaaaagtttctcctttgattaagaattaatatttagtcttttgaggaaaggcagccaggggctatgtagagagacctagtttcaaaacaaaatgaaggaaaaaaacaaaaatgattttatctgtattcttaatcctagttttgagagtttacatgtaaacacagaaatagatttgctggcctgggtttttgactacatactccaactgctagtgcataatgctctcatgctttgtacaactttacaacagttgttggtgattgttttttgagagtgtaaatctagcttgataattgcaatatagttatgtgtatataatttatagcctttggagtgattagttctcttaaagcttttgtgtagaaaacttttagcatggaaataattttagaaaacttttacttagataatgttaaaatttttgctcattttattttgcagggattagaatactgcgaagaaagatacacactggatctagcaggtggcatgttacccttaagaggacagactagtaatactaaattattgggatgccagagtatagagagattcccatctcatggtgacagggaagaaagtatgagagaaggttggttaaatactcctaactattttgtgttgtgataacttaagatttatgacaggtttctagaactaatatttctgacagttgaaaattaagaccctggttatgttgtttatttaggcttttagctctttcttctttctggattactattcagaactgaagaatgagtgatccttgtgtttgactccaacacaaaggtggggtctccattgtaattagtgtaacttgtctttggatggtttcttatctgtgtttttttgttgttgttgtttgtcatttgtttatctttagccgtggtgtatgttatttattttcagccatgctgtgtttatcttgacctccaattttctttagtatttccttcttctgggtaaagatcctagggtagatttctttgcattcagcattgatccattttccggtgtagcctttgacattttgcatttgagtccacatccaaatgaacatgtcaaaaacttaccctgccatcttcatatttcttgtccacatcttcctttttaagttaccataagtggtatctgaggttttacttttctctctctgctgaggccccctttctggtcctgtgctcctgccacagactaggtatttgttttgcctctgaagaactgaccctcagtacttagagacacccattttgggtattggataaacttctgtgatagctgtataccatccttgggggaatagtctttggagtcactttgtattttttactttggtgtgtcatagtcacaatattaactgaaaacaaagagccttctgatgagaacttcccagtagctaaagagggacatgcagtataagtgaaactcaaatgatggataagaatgaaatgatactgtgattctttattctgtttttgaaaaatagttgttttttgtttgtttgcagctctgtcccctgataccagtgtttctgtcttcacctggcaagtgaatatatatggacaaggaaagccctctgtgtacttaggactttttgacattaaccgttggtatcatgctcagatgccagattcattaaggtatgattactgtgttttctcacccccttttccgtcagatactgttatgcatagctgatcagtgtcttagtactttttaaatcttttttaggtcaggagagtctctacataattgctcttattttgcattgtggtcattggattcagttgtcagtaggacttctccacatcacatcttggacatactggttcacgagagaagtttaaatcgaggagttgctccttcatatcctcctccagagcagttttttaacccaagtacttttaattttggtatgtattttcataatattttgaggaaaataatttgtagtatgtcagttgtatatttattcagtttatatatgtcatctgttcatatcttactggcatttaacttagataactttgttaatacacagttaaatgtacatgagaaatttaggatgtgtaaatactactttgaatcttttagaatgtcagttaatatgttagtgatagttttatttttttaagagggtggtgatttattctatataatttggttacttgcagtaaacatttaatttgaattttaaaatctttttctttttaagacgccacttgtttattaaactctggagttatccatgtaacttgcactggatttcagaaggaggtatgtgtgagtaacaacacttggagttcagtaattgagcttaagttgaatgttaacaataatttcacagatttaaactctcatggtatttgtaaactaattcatcttaaatagtagtttctgctaggtttatgagtttagcatcttgctacctcagttttaatgatagcttgctagaagagacattggagtgtggatgttatctacttgaacaccaatcacatctgggtggttgctaggaagacagggtttctcagatgattgttctagaactgcagcgccgtttgctctgccttttatgtgctggggttaaagactgcaccacagctgtggctcatcctttgtgtggtggcctggggagggctttgccttggctcttctcagaaataatacaaagttgacatagggatgatggaaaatagttttctggggtaacgtgatgtgcagatgtggtaatcagccacatgtaattagttgctgtgtcttagctgtcttagtgctatatcattcatgataaacatttcttgagttcaggaaactgtaagctccttaacttgatcctgcaatttaatcagttttccattatttctatagttatttttgttttactcaaattttaaatataaagtatttattaaattggatttgagttattggttgattttggactgatttttctattacagactttgacatttttaaagaaatcaggaccatctctcaatgaagtcattcctgatagttacaatcggtgtcttgttgctggtcttctctcaccaagacttattgacattcagccttccagtttaagtcaagtgagatagctaactattttttctttcttttgaattgcatgttactatctattgcaatatgaatataactctatagcatattttttgcaaaagtaggtaatgtgtttcatgctcattctatatcatgctatttatcatgcttgggatttggcttccaagtcacctaatttagctagagaaatggctagcagttaagaacaattgttgcacttgcaggagatccaggttcagttcctgggatccatatggtgtcttaaaaccatctgtaactttagttccaggggacttgatgccctcttttgactgctgcaggcactgtgtgtacatatgcatggtacacttacataaatgtaggcaaaaacacctttaaaaaagtcacacatagaggtgggcctggcaatgtaagcatgtaattctagttactgagggagcaagatcacaagtttaaagtcgggctgggccacagagtgaattcaatgcttgcttgtacaatttagtaagactctgtcttaaaaataagaggactgaggatagagtgcttacctagcatgccctgggctccagtttcagtcctcagtaccactggtaaatgtaaagacagtttgtgattcccttagctgtctagttggttctctcaaacatgctgtccaagtcttctgagtctcccattttcccacctccataccaatgctggttattaccatcctttgcttttctcactgttttccaggtttgcctcaaacttgtgatcctcccatcttaaccttccaagtgctggaactctaggcatgctatttattgtctctctgccgttagccaaactggggagtcataactattttccagcctttcactgcttgtaatttcatagtggtttgttttttgttttttttcctttaacatggtttaggaagaacaattagaagctatattgtcagcagcaattcagacaagttccctgggacttttgactgggtacattagaacatggataacagaaggtaacagtttaactttttaaaaatgaaatatatatttttaaaattacagttcatggtttcactttttagttaaactttttgtgagataattataattcacataaacttgtacagcataatagagtgaatctgtatatgatttatagcagttttcttccctgagtgacctcttgtgcagtatcacatccaagatcctgagcatagccgtccatatccgcctcctcctgcccggtgcctgagcactgatgtgccctcgactgcctcagtgtcatttcttgtatgaacgtgaactgagtcgagcagagtgtaacttctacatacctttccactcagctagattccctggagatacattgtgtatctcttgctccttacatgtatctatatatatgcatacgtgcgctctgccctgcccctgtattgttttgttgtaaacaatttgaaagaaagcattctgcttcttacttatttcaattttattttatctgaaaacaaatgatgctcacctataaaaacttcgtgattacaaactgaagggcaacaccaagtgagaacttaccagtgttccagaatacagcatcttttgtgtttttgagttgtttgggcaattttgtttattttagataggtttctctgtgtagtcctggctgtcctggaactcactttatagaccaagctaaccccaaactcagagatttgaatatgtctgcctcctgagtgctggaattaaaggcatgtgcctaaaataagttttcagtcttttaatattccaaaatttctaaagtcaaatttaaaagactataggccagatttttggttttggttttggtttgttttgttggttttagttctggtttttccagatagggtttctctgtgtagctttgcagcctgtattggaactggaactcgttctgtagattaggctatcctgaaactcacagaggtctgtctagctctgcctggactgggattaaacatttcaccaccctgcttgtttgtttaagattgctttctagtttctaataattgatcttcctcataaccactcgctacctctcctcaacttcattgggttttgtagcttgggcagcatggttcctgcgataaggtgtaccaagataaatttggtagaagttggtcttaaatacgtgagcttggttaaggtgcctcctgcatggttcctcttacaaagaactagttttcattttggagttaataaccattctttttatctttattcttttataaatacaaataagaacaaccaaattctgctgctaatctacgttttgttcttgaatggacatggaataaggtggttctcacaaaagaagaatttgacaggctttgtaagtattaagtctgggttcagggcaaatttcaatagtttgaatctaatgttgatgttttattttcagatagggcatttgtctgagacaaggtctcagtaacgtaggctgacatgaccctcactatatatagtccatgcttgcactgaacttgggctgaggctccctctagcctccgtgtgctttgaattacatgcatgagccatcacatctagctcagtagtagttgtaatatttgggtcatgaaaaatcttaagattggcctttaatcccagcacttgggaggcagaggcaggcgaatctctgagttcaagaccagcctggtctttagagctagttccaggacaggctccaaagccacagagaaaccctgtcttagacaacaaaacaaaatcttaagattggaagaaaacatttaattaaagtggttaaaacaatctataacaatctggcagtacattaattactaagctatattagcatattatagctatgtggccaaagatgatcctgcctttatgcctcccaagcactaggattatagttgtgtgcctccacacctgactgttactcagctgttgtggaagttttaaattttatgctggttaatggagacattgtgaatttttgttgtttgtttccttaaacttttaagatactcaaatgcagatatggtattataaatttattagaagaaaattagaacttgatttaagagactgagaaattaagatagttgttgggttttttgtttgtttagttttgttgttgtttggggttttttgtttgagttttgttttgttttttgtttttcaagacagggttttctctatagctttggagcctgtcctggaacttgatctgtaaaccaggctggcattgaactcacagattcaccttcttctatgctgggattaaaggtgtgcaccaccactgcctggctaattattgtttagattagtcacacattaaatattgatggttttttaaagtaaatccatattttatgacacatagtcattagaaggataagtgttagacctatattaaatttataatcttactttgactctggttttatatttgaaagcactttgtgagttccttgatatttgccaattttggcctatatttttaaagcctatcatcctttatagtagtgggacttcaagacaatgaacattgattctcatcttgtattttatccttggaaggtgcaccattatttgatggttcctgtcgattcattgacccacaaaccatacagtctatccagcagtgccatttacttcttagcaaccttaatacagtcttaagctgttttgcaatggaggcacagggcatcaccgaaagaggtgtgtactttatacaaatgggtatgttattaaattttacttaattctcctaaagttctccaagatgaaattttttttcagtaatgtgtgtggtatatgtggctgcgcatacacacatgtcatatagtgcagctgtcacaagacagctccgactggctctgtctggctacttttatgtgtgttccagggattgaattcaggtcttctggctttttttttttttttttttttttttttttggacaggtgtctttattcactgagccaccttgctagccttagaatttactaccagtagaatttaaaatttgaggttaatatgtatttttacattaaaaagggtgactttttgttttgtttttgttttgccatttcagcaaaggaaaaagtacaatttcatttaaaggcctaatttgaacagtctattttaattgcattttgcatgaaacaattgtagattgcacaaaaatacctttttttagtcagtgagttatctttttgtttgttttgtttgtttgtttgttttgagacagggtttctctgtggctttggaggctgtcctggaactagctcttgtagtccaggctggtctcaaactcacagagattcgcctatctctgcctcctgagtgctgggactaaaggttcgagccaccactgcccggcatcagtgagttatcttaacattttagagatttgcttaacttcactttggctcatttgtatactaaatacaaactaagttttatatatatacatatatatatatatgtatatatatgtgtgtgtgtatatatacacacacattttggattgtcatttatggtcaataaattgaaagttaacacaaccaatgttaattcttttttataggactggtggacttgagcaataagcatatggttacccaacttatctgtcaatatgcacaaatggttctgtggttttctcattctgggcttttacctgaaggctcaggtaaagtatttaatatatgaatattgattgttacatcctagctccataatgttctagtcttcattctcccttactttgtatctgcattgcctcacagaggctccatgtatgttcattggattagcatgtaaaataaaagcaaatttgagaaaacatgacttctgaaatatcacctaaacactcagaactatggcttttataacctaatatactgatgtcttgtttagttcttttgttgttgttttgttctgttttgagaaagggtctcactgtatattcctgtgtggcctgaaactcatgtagacggggctaatgtcaaaatcatagtttcatagtttcatgcttctgctgcctagacactcttactgtcctagaactcagtatgtacaccaagctggccttgaactcacagagatactcctgcccctgccttcttagtactgggattaaaagtgtatatcctgtgctggcattaatatgtttattaatacttgccatcaattaaatggttactttaattaattagagacttctgtgagattcttagtactggcttctatagagtttgtttacaacaaggaccagacttatatttccaggaagtgcagtggattctactttaaaagttgctgtgctcactgtatgtgtaattgttgatccagcatccttataacaaacttcaagaaagattgatttccttacttacacatttgtttgtttgtctattagatgtatttaaataaacacttgatactttaagaatttcatatatgtatagaatgtattttgattaactgtgctctttctcaaactcttcccagatccatttcccccactatctcccaactttattgattaaattttagcaagactaggtcaggcagtagtagcacatgcctttaatcccagtactcaggaggcagaggcaggcagatctgtgagttcagggtcaccctggtctacagagctgaattccaggacagccagggttacacagaaatcctgtattgaaaaataattaattaattaattaattaattaattaattaattatagcaaggctgaaactttattatgcaatcagtaaaatcagttgttataagctaaattttgagatattttggcaatattactaacttttcccccaactttaatataacctccagatgatgctctgcaactatcaagggtacgctacaactaccctgttattcagaacttctataccagtcgtcggcagaagtgtgaacgctcgcccaggtacagtgcagcctcactacagtattcacgctcatactgtaaaatgactagttgaacttcctggtcaagtattgtcataactgacactgctagttggattgtttgctttaacttaatgtctatacctttttattgacaataattttttcatacaatatattatgattctggctcccccaacttcttccagatccttccacccacccaaatctatactctttcttgcaaacaggcatctaaaaatattaaataagtaagatggaagcaagcctgatcggacaaaacaaacaaatgaacaaaaaacttaaaaagagccaaagaaaaatcacaagaaacatacattaacagcacaaaaatccctaaaaacacataatcagaaactataatatgtaaacaataatagggcaagaagaaaatgcccgtacaaagcattatgggaacaaaataccattgagtttgttttgtgttagacatctacctgctgttaatatacaactagttgtatattaccaaaatcataaaattctagtagttatcactctcaaatatccagcccagtctcatgaaatgtattcttcccccgaccagagaaacagggttgtctgtattgctttgaagcctgtcctggcacttgctctgtagaccaggctggccttgaactcacagagatctgcctgtctctgcctcccgagtgctgggattaaaggcgtgtgccaccagtgcccagctcctaagtatgtattcagagtttggggccttgcagatgatacgatagtatacatagtgaccctaaaattccaacaagaaaatagttgataaacacttcagcagagtagcaggatgcaaaattaatacacagaaatcagtggccttactttgaacaaaggacaaatgaactgagaaagaaatcagggaatctgtacctttcacagtagctcaaaaaatatcttgtcgtactccaatcaaagaaagatttgtataataaaatcttgtaagacattgtagaaagaaattgaagattcagaagctagaaaggaagcttgttgattggcaggattaatatagtaaaaatagaatccaacctgatgccttcagtttaaactagagcatccatcctatcattatttcctaaataaaatgatatacaagagtgatttgtcatgggagtttgtggagtcactcttccaccctccaggaattcttatttggaaaaaagactagaatcttctactcatcgaaaacctatgactatattatgaattggttattttagcagttttcaaaacttggatcttttttccttttcatattttttgtagttctctcaaaaaagttaaaaaaaaaaaaaagaatagcctagttagttgccttgtaattaaaaaaaggggggatgatcaaagaagtatttgaatcctgaattctgtttctggcattagatagtcttcctcagcttgaccaagtagcatttagggcatggcttgcaagtaataattctggatttctagggtcagattctcctgggaatgagctgaaattctaatgtgctgtgaaatttggaaactagtcctttagtgtaactgttctaggatagtaggataatggacgtgaacttggggaattaattggacagtgactcctttgtagaacggaaaggtagatgagggtaactttgaacttgattttccaacctcagaaaatctagtgtggttctctactcctggtctgactaggtatatattttaaagttttaaagccattattttgtaagtgtgtgtcctttggaaggtttgctttatttgtaagctgcaatatagaaaagtcaattgtacacttagtatatgtctgactgttataacagtttcaataaataaaaaactgctgctgctgttgataagtgaggagggctggaatctgcttaccacattggacatgttcagtaatacacttttgaatgaataaatcaggattcagctctgagttggagcaaatattttactacctggggctgctgataattaattcagaatggtgaaagctgttttgctggttaaaccctattctttcatagtatttactaatcactggctggcttggtaataactgaacttgaagcaacttaggggttttcctgaccaatgcccctttatttctgtagtccatgatactgagagaagtccacttctctcagtattaccttctctcagacaattacctgtcttctggtaattatatagttttttgagcatttgatacttactgttttgataccaatatttaatattaatgaagataatctttaatgtttctcatattgcagagggaagtggaaccatgattgtttgatgattgatggattagtttctcaactaggagatcaagttgagaagttgtggaaacgggatgaaggaggcacaggaaaataccctcctgctagcatccatgtaggttacagtattatggaatcatttaaagagtctgagtggagagaggagcatttgaaaccgaatgaagttttcatgcctgacacaggctagagaaagtgggacatgaggaaaagactaaaaagcactgacatttttatctttttcttttataggctctacttgacatatatttattagacaacattactgaaacaagcaaacacgctattgtatcctttaaaattttaataagtatttgtatattaccaaaaatcatacaattcccatagcagtactctcaaatatttaacccagtctcatgaaatattttctttccccacctaagtatgtattcttatctcagagtcagttgttgataaatgtaaaagtatatataaataatggtcttagattggcagttggggtgagcagtcagtagcatgtgtcaggctgtggcttgaactccagcacttaaaggagaacaaagatactaatattgctagtgtccgagctgccattgcattctaagtagagttaatttatgtattgaagatgactacactgagagctcactcacagggctggagataaggctcagtgtttaggtgaagtgcttgttagctacgcatgaaaacctgagttcatgtccccagtaccacataaaagccagggaaaggtgtgtacctgcagtcccagcgtgaaggaagcagagacaatggattttaaggccttgctagccagccagttgagtcaagtgataagatccaggtccagtgtgagagagagtttctcataaaaatgaaaataaggtgtgagcaatatctggcgagttatccctctgtgtctgacttctggcctccaagtgtccctgaaaacatccgtaagcatgtgggtgcatatcccacacaccgtgtacccacacataaacaattttttaaagttagcttcctacctccttaggcattatttggaccttatgctttttttgtggcaatgttttatcctaatgtcattttagcttaatctactgcttgttgataatttataacatatttgatggatttgtttaaactaccagcttttggcaaataagagtttgatctatagctctttttaaacttactaaaccagttacttggatttatggtttgttttaatgaatgaggtatattttttgttcagtcttttgttgtagcactaaaatacagagaatgaggttgacatgggacttcttttgtctatgtttaatggactatatccatagctggatatccctaatggccctgtaaacataagtttttaaaaacctcttaattctaccttctattccctattctaagtatgtatgtaggattttatctttaagtttattgtccttaaccctttttttaaaaagactatttatttgctacttgatattatgtattcctttccaaacaaaatggatactcccatcgaatcttttccaactgcctttgctatatcttggggccaagttaagttagttcaaggattttggcttctagatcataatgactatgaggtgagtatttcatgtgtaatacaagcttttgtaagttagctctcacccatgcagcaggaatttcatttgataatctcaggttacttgctgtttaaagaaggggtcatacaggtggatggttggaaattatgaggctctgactgttgtgtgagatatgtttgggttttggcataagtcaaagaagatatgttaatgaggcatgaaattggtataggaagactttatatgaggcttcaaaggtatggcacttttgttctttgaactctaccatagattagctcctttgatcttacattaaacttacttaattttgacttctgtgattttatttttaattctacttgtccttttaagggacagctgctttgtccaaatacaaagaactatttatatttaagatttcatcatttttcagaatggtttagaccttctgtttcacccagttactgcaaaacctacgtcgtggcagcattcaaagataattgaagcctttatgggtcagggagaacacaaacaggctctccggtatcttcaaacaatgaagccaacagtgtccagtagcagtgatgtcatccttcacctcactgttctgctctttaataggtaagtacattttaaaaatagaaattcttgagccgggcattagtgtctcatgcctttaatcccagcactcaggaggcagaggcaggcagatcgaaaccagcctggtctacaagaactagttccaagacagcctccaaagccacagagaaaccctgtctgggaaaaaaaaaaagaaattcttaagtcacattttagtaagtggaatttgttaataaatgaaatatagtgagatagcttctatctataatcccaatactcagaaaatggagaattatgtattcttgaccagccctagatagatacatgagaccccatctcaagaaaataaaaatacataattttacattggtcacattacctaatatccttataagaaatacatggtggctttcaccgagaatggtaaataacaagtacattgagtaaaaaagtaacctctaaggtgagtctgtcagttggacctgagtttaacacagtattaagttacttttctgttgctgtggtaaaacaccatgaccaagggaacttttagaagaaagttcatttggacttggtttccagagagtcaccatggctggggagtaatgctgagagttggcatcctttaccctaagcatgaagtagagagtgggcactgagaatggcagctcagagcttttaaacatcaaacctacttcctccagctaggctgcaccttctagacctaccccccagagtgtcaccagttcgtgaccagagtactaatgcccgagcctatgggagacattcttactccaatcaccactaacataagatttgtttttaaccccccaagtgcacagaatcccagactggtgttagactcttctgtaagaagcagtgcttcattgacatggtgttactgctcacaggaaaacagttcagagcttccacgtgacgtttctagttgatccaagttttctgatttgaccttgttgtagactagccaagatcacctactagaggtcttcacattttccttcccctgttgtgctcatgctaagcatcactaccacagtaccctgacttttctctgtcacaccacacaaacctcagttctttccaggccaccttgtcagtcagctttattttctatgacataatgcttaaatattggagagctgcataaaattgaggtgcctagttgtagctgggtatttattatgtatacaacattcggcttccatgtatatctgcacaccagatgagggcaccagatctcataacagttgtgatgtgagccgccatgtggttgctgggaattgaactcaggacctctggaagagcagccagcactcttaacctctgagccatctctccatgcccccaaaatgtatgttttctatgtgatatgtggctttttgaacatttggtactgatttcaggtgcatggttgaggcctggaacttacttcgacacaactcaaacagaatgaatatagaggaactattaaagcatgcttatgaagtttgtcaggagatgggcttaatggaggatttactgaagctaccatttacagacactgagcaggtaattaatcagtaatcagtgtagacttaaaagaaatttagggtaaattgatagtttacaaatctcccttgttctccctaggaatgtttagtgaaatttttgcaatccagtaccagtgttcagaatcacgaattccttctagttcaccatttgcaacgtgccaattacatttctgccttgaaactaaaccagacgctgaagaataatctcacggtatgattaaagttgtcccattgtatgaaagaacaagaaaactgagacttttttttttaactactttaaaagaacgtacagtttgatgaccatttgctttacgttgtcttgagcttggagaaccctcattggtgcggttatcattgtgactggtgttactacggatagaattctgcatgtgccgctgtattctgatagagggaacaaaaggaggattcctcgagagtagttgtgtagtgcgaaaaacatggaacttcagaagtcacactgactcttagcgtgttatgtgcacataggacaccctttgagccttggtttctttctttctttctttctttctttctttctttctttcttttaagattttatttattatgtatacaacattctgcttccatgtacatctgcacaccagaagagggcaccagatctcataacagatggttatgagccaccatgtggttgctgggaattgaactcagtacctctggaagagcagtcatctcgccagcccaagccttggtttcttgatcacttaaatgacagtatttgggagtttgtttgcctgggtgtcatatccagcatggctgcagggatagacctgactggagcattgaaagtgtgaaggagtataaacacagacacaaatgctgggatcgggtggattgggctcttagaaaacatcagcaccttgggacttcagcttgtttattatatacagggaggtgggttattgaatgtagctgaacaaggaagtacctgtattctatacagataaataaggaattacctgtttatatacagataaataaggagaaggtagagtttatggtacacagctggatcaaggagaccaggttatttaatctaatagaagtggtcttcaggccacaaatatccagtagaaggaagctacgttttctgtatacactgttaacgttcacatatgaaccagaggaagcctttgcttctatgtgtgtgtgtgtgtgagagggggggtcctctcttcccatgcacctgaggcttttggctcttgacatgcccatggccatgtcaacaacacacattcactcagaacttaacacagggcttcctctgctccccatacatgaagctacatacatgtgaaggagtattacattggtgttacattgtttgtattccttgtgaaggaccaagccttggtagtggatatttggactgtgtagatgtgtacacaattttaaggaagtatatgaaagctgagctggaaaaaggtagatagaagaaaataccatattcataatttcagtgataaatatatagtgacacctatcaaagattaaatttttgttaatagagtgattaatgtgtttaatagagtgatcgtgatccacgtttgcgggagagatcagtggctcgaaattctatattggaccaatatgggaaaatcctacctagagtccagagaaaattagccattgagcgagctaagccttatcatctatcaacaacatcagtttttcgtgaaggtaactaatgtcattgcagaatgcttatttatactcaggctacaaaagatatcaagtgattctcttcctggagtcactaccaccattttcttgagttgtacagttatgttaccttttttctgttataaaaaccttgttagagatgcaactgagtcctgtattctttttcagtttctagacccaaaccattatcggcatttccaaagaaagctgtaactggaacagtgttaacaagatctacgttcatcaataatgtattatctaaaattggagaggtgtgggcaagtcatgaacctagaaatggcatctcactttacaataggtattgtttttaattacctttaaatattactttatgtgtgtggtggagggataaggcttgtagctcacagagtctgtgtggaggccagaggactatttacaagagttgttttttccttccactgtattggttctggggatcaagcttggggtatcaggcaggtcttgctccatgtactctttgcagaacagcatctgtgttcatcatcaaggcacctcaatgttaacaaagttattataatatagaatataaaaattgaagcttctgtaagttagctactcactaaaggattgttgtgtcattaagtgtgagtgcgtgcgtgtgtgagtagatcagaggacaacttgtgctactcagttctccaccatgtgggttctggagattgaattcagtcactaggacatgtttacctgctggaccttctttctggccttgtttcccagtgaaaaatggcagtcctttctctaccttccctccagtctcagcatttttgtggtgttagcttcatttgagttttgtctctcttagccctaaagcagatccgccgtcccctgcagtgcaccccttctcacacccggagctccctgaggcatttgttggaacaccaatttcaaaaacatcccagagaatctctaggtgagactttcttgggttgtattgaaaaaactaattgtcttgagttttaacaggtactgttttaaattcttaggtaaaaatttcaattatactttctattataatttggctaagagtagagtaattttaggaaattatatatcagctattagtgtacttaacatttctgttaactcatgcggcttagtgaaaataagcaaaccatatgaaaacctttaggagcataatctgtcaaacttaggttttgttgatctctaaaagaatgttgtttctgttaattaattactaaatcttggttgacttggtaaagatttctcctgggttttattgaagtatcttttgttgcttagtttcagtaatactttgatcttacctaaataattactaaagtaaaaaaaaaaatgaaattgtgattaagtgtatatttaagacattggatagctgaaaagtattcatagacattactaacaaaatactttttattctgagtaatacctcagtattttaaatttttagttgtgttgtcaaaaattacacttattttattcaaaataagttgaatttttttatactaacagtaagttacttgccataaatttgtaacaaatagttgaaaccaaagatgtttgtcactttcgtaattggacatagtttgaaagatggaaaagaaccgggtgttggtggtgcacgcctttaatcccagcactcgggaggcagaggcaggtggatctctgtgagttcgaggccagcctggtctccagagggagtgccaggataggctccaaagctacacagagaaatcctgtattgcatgatccaggagacaatcctacatccctgtctcgaaaaaccaaaaaaagaaaaagaaagttggaaaggacctactttttagactaaagctagttagatggtttccattacctcatgatagttagctgatataaatgaaattgtaactgatttctcttttttattagttgtaattatccccaacaaatcactgtcttggtccctttttaacttagcagcatagagtgtagggaaggcagtaagaccctcgtgaagacccagccaaaaggcttcggtgatcaagtgtaatgagaagctgatattaagtcagatcagatatcctattaactgtgactgtatgccttctcagaaaaattaatgcattccccagttgtgtagttttatattgatgtacattattgcacaggaaatgagtcaccttttgaagaagtagagtccaataggtactatccgtcaactctgggattttcctaagggttaccttctgttttctattgttttgtatatactagaaagtccattcttacttggatcacaccaaaaaacttgggaaatcccaagacctacagtacaattttagtcctctgtgtgagagttgggcatgggaatggcttctgctaatatttccccattgaataaacagtttgatgcccttctaatagtgagaagttgaatcaaaagactgggattccaaggaaaacacatcgtacaggtttcttatttctggcagcagcaaagcaggtctcactttccttcgttgtcagctgaggtcacccttgcattttggaggaagtacatgatgatgtttgtttgttttggggtgtgtctctgtgtgttttctagactggctttctccaagtagactaagctggccttgaactcgcaaagatccacctgcctctacctcctgagtgctgggaataaaggtgtgcgtcaccactgcttggcgatggtgctggttttatcactaaatactttaaccataagctgggagtgatggtatatacctataatctcgacacttgggagggttgaaggccatccttgactatacacacacacacacacactctcttaaaacatcgagaagaaccacctctacaagtggttcaccagatactgtgacctgaagatgtttcctggaggttaaaattacatgtaaagggagggtgagtaactgaagttcttgttttgaaactgttatctagaattcgtaattcccttttgcttttgaaagaacttgagactttttaaactaatgctggcatttttatttcattagtatacttgcctaaaattgtttacatgcatagtagtgtttagtagtaagcacacaaatatgaatctttgtataagttttttctatttaattgcagattactggatttggtggttcatcctatcccccagccttctcagggtttggagtttattcagcgaagtcccacaagatctcctttgtgtcttctatccagttcattgccattaaattcacaattaaaaaggccacatcaaaatacctccaggccttcagaattacttttacttgaaactcctcctgtagttaaggttagtattacttatctgatgtcctggggaattagcatgtttcaagtagcacaaagaaattaagctgtttatggcataactatgggtagttaaatgctttacttttagttctttcttatttattattattttatttttttgtttgttttttgtttttgaggtattgtttctctgtgtaaccctggctgtgattgaactcgatctctagaacaggctggcctggaactcagagatttgtctgcctctgcctcccgagtgctgggattcaaggtgtgtgccaccaccaatgcctagctatgcttatattttcaaagcactatatagaggataatatatatctgtatatgagaatcataaaatgttcctaataaagtgctttcagacttttcagtgataccactttattgctgataatcatatttgtagttttttttcttccaaatactttgattttaggcttatttttatttgttttattttgaactatatattatatagtatattaatatttatcagatgatctttcaaaggtttctcttcaaccattcttgataaattactaagaggagaacaaatccaaacttgtgatgactggtagtaatgggcatacacatttttcatttttccaagtatttttgcatatgattttttttttattagttagagaggaaaaggtcagggcctttagaaagagtgtaaaaataattttggcttgtaaactgaacataaagttctaattgaagtttgtattttcccactaatctgaaacttacttatttaagataaaaatgtatatgcttggccgggcattgggcacatgcctttaatcccagcactcaggaagcagaggcaggcagatctctgagtctgaggccagcctggtctccagagcaagtgccaggataggctccaaagctacacagagaaaccctgtctcaaagaaccaaaagaaccaaaaaaaaaaaaaaatgtatatgctttgaaattattctctgcccttgtataaattacttgcaaacactaatggtgattctctttgctcttcaccttagaaagctaaatctttggctatgtcagctacttcttctggatttgccgagtttactcctccatccatccttaggtctggtcttcgaacaacacctttagcatctccctctctatcacctggaagatctctcactccacctttcagacttaaagaaaccaggatttcattcatggaagaaggcatgaacacacactggactgatagagatagagtaagttttgattaacatcacagtttttttttgttttttgtttgtttgtttttgtatacaatcttgtcttgaaacttgtcttgaaatagtcctgcaaaaaaactttagaaagtggactaagccaatctattttctactggtaaaataaaataggtgtgtgtgtgtgtgtgtgtgtgtgtgtgtgtgtgtgtgtgtgtgtgtgtgtgtgtgttttacactattatgctattaaagggactgagaagctgcatctttggtgacagaaataacagtaggatatatatgcctcctgatggtttggttttcatccagtatcttgttgcttttcttgcctaattggtttatacatagtaagaatatctgtggagtccactttagttaacattaatagaaatctacctacttgataattttttgtctgttgtgtacattgtattttgttttagtcagtgataaattacagatagagaaatgttaatagcagttcacttttagttatgcaactgaaaaaattgatctgaaacaaataaactataattaagaaagtttcaaaaatatgaaatgtggaaagggttggtggatgtgattatgttggatagctagggctctgatgctttcattttcttttcacaaatcccaggctacagatgaccgtaatgcagaagtgtttgttagtacatcattccataaatgtggactcccagaagaaactgagtggatgaagactagtgataaaaatgtatattttcctttggatatccctgcaaagggtcatcagaaagtggttgctgggtcgctggacacccactcacgaagtctggagaaactggatgtgagcaaggaagacagcattgcttcaaccagatcagaccagacttccttagaataccatgatgcaccatcaccagaggacttggaagatggtatttttgtgtctcccaagccagcaagtgcttccactgaactaactgctaacttagctctaccaactgagaaggagaatgataaagatttgtttaaatcagagggtactccttcagctgtagagaaacaaataggtaggaactctttgtatatactcaagttcataataggatattttgactatagtaaagtgtcaaggctaaataaacattttttttttctcacagtgtactaggtcctagacaaagtaaatcttatttcagtttaggaaaaatgtgttctttcataagtaggtaagacatttgatgacaagagaacttgtatgtgctacctttttatttatttcaacacgacatttggaaaacagcaatggtagtgtttaaggaagagacctaacacgctgtagtatgccttgaaggttttccagtaactatgagaagtaatagtgccaactttataggctgggtgaatactgtaattttagacttttctagcagcctgtttgctagaaaccaggaatttgattctgctgtctgccctcacctctgaaatagggacaggaaggtaataaatgtgctcaggcccaggtttctattgccttaatcatttgtctactgaaaagttttttggtttttggtgatgggagttactggttttttatttgaagtttttgttgttgttgttgttgttgcccctaaagtgtgtgctctagtagacaatgaccttctccaccccacagtatgttctggctgttgttgactgtcagtagtgagtgctctggatacactacttgcctgtacactgtgtagtctgtagtggactgtattggcagacacttagtgcaacttgtttaatgctgtcttgggctatggggccaagtgaacatcagaacaggagacttggcttagaattggtggatcaaatgcctgttttacaacattacatttttgagcaactttatgaaaggtatttctttagatctataaaagtaaatgcatgtaataaaaatctgtcatttggatggagctcagttgatgcctagcaccaagtcaagcaggcatagtagaactgtaatcccactcaagaggaggtagagcaggaaaaccaagttccaggccctccttgcctacatagtattatgaaactagcctgggatctatgaagttttacctcctttaaaaaaaaaatctgtgtcataaatagattttatttaatgtttttagcctagacagaatgaaggttttgtaacaggtaagtctatttagattgtggtgtctttagcaaacatagatattaattattctaagacctttagaatttggcttataaatagaaaatgaatgtcatgctgctttattttattttttttatttatttattttggttttttgagacagggtttctctgttggtttggaggctgtcctgaaactagctcttgtagaccaggctggtcttgaactcacagagatccgcctgcctctgcctcctgactgggattaaaggcgtgagccaccactgctttattttttgacacgcatgctatattccattaaaaatacttaaattatttctactaagcattctctttttgaagtgatagaaaataacataaaccctggagtgtagtaggttaagtttgaagcttagcccagattctaaacatggtttgtgatctgagctaagcatgcatgtagctttatgctttgggttttgttttgttttgttttaactatttctttggatattgaggattgaattatattagggaaactacccttacaccaaaaatgagcggtaggaagttaagcgggggctcttgaggtaggcctaaaggagaaggaaatgctaacagtgtgatgccaaggagttgaaacaaattagaacaaaagaagtaggacaacttgtttctttaaagtgatgataagacatttaacatggctttgtctgtatgacttacaggcactgtagaagctgcagtggaggcattttcagaatgtagtcactcaagccctgttgaaagagttgaagcttctctgtgtgtgtcatccgtctgtgaagggtgagtttatggaaatgagtgtttgagataatagcttgtgggttaagagtgtgtactgctcttccaaggacccaacttcagtttccaagcacttgcattggatagcacaaaactgccagtaattccagctccatgtgcagctatacacacgtgtacacacacacacacactaccaaaaaggaacataaagaaggtgattgagacagcccctcccagtctgtgtgtcacgttttattccttttttgagtgtgatagagccacataatgagacccctgtgtcaaaaagcaaaagaccaaactgctgcagagcattattttaagggttgttaattttgcgtatgctctggaacatttgtttaatgatgcaaagatgtgtttgattaaataaaattcacctgcagtctggagactgcttcagcaactagctgacaggaagttgtagggaggagccaggtggagaagggtttataaggagtgaggagaaaaacgacgaggacttcttgggggtttcgaagaggaaagctgcctctctgggaagcaggattctacctcaacctttgaatcttaagttctttagcagagagagatttaattaagttttcttagtagctttgaaagagtgcctgagggaacagaatttcttcagactttcagctcttgctgtctaggcactgctggtagcgatggagttgcagtggctgagtagttgccaaaaaagttgttctggaggtcatttgaaaatattatgcttcaagtgccagcaaagccaagatgtactagaagatgtgtgtcagcacttgctatctgaaacatggtgtagttaggtattggtggctcacaactctgtcagcacttgggaggctgagggaggaggaacatgagttccaggtcagtctgggttattacagggggtctgtcttcattagtggggaagaaaacccagtctagcaaattagttctagttcctagattatagtcagttgtaaggttacattaaaatacataccaatccactgcttccattattgagagtctgggctggagagatggctcagctgttaaaggctaggctcacaaccattattgagagtcagatgacctaatcgattggtatgatcactggtataatcattggtatcatcacctttgtttgagttcaacacttggagtagcactgttgtaagggatataaaacagtgacagctttaattctttagaaataataagataaatttaataaaactagcccacaaccagatgttgctagcgcacgcctttaatcccagcaagaggcaagaggcaggtggatctctgtgagttcgaggccagcctggtctacaaagcaatttccaggacagcctccaaagctacagagaaactctgtcttaaaaggcaaaataaagaaatgaataaataaatagttcgttactttatgagcaagcaatgggtataacattatgagctgttcacaaaacttggattgtcacctttatcaaactcagtcacattttctgctgagaataaaaattcagtaactggtatcttccaggactttataacttttttttaaaaagaaaggtaggagaaataaaggagtttcttgatttttttttaattgcttattttgtgattcttcattttaataaaaatgaatgttacttatttcagtaggtttgatgggcagatgaagattatcactcatatcagaaaagttagtttcagtgagaatctaggtgaatatcaatattttggcaagccagtttctttgaagcaaacttaccaggaaggttgtggagatttaattgttgtgtattagtcatcattgctataaatattgttatcaagataatctcacaaacatctatgaatgatgatgtacttcaaactgctctcttggaaatatattgtctgtcctatctttaaaactcagcaggctttagttgtgacttagggaaaagccactgccaggacattttgcaattggttatccattcttagttatttgccttaatatttccagatagcattaaagtgctgatactgagtctaccaaatcagaggaaatcctgtatacacttaatttggaaaatatagctactgattatttttaaatgcttgaaatgtaatttatatcatgatagacgctcagaaatcattttatttgaacttttaaggctataccattgttacaaaaaagtaaaaagaagtagggaaaacaaatgcaacagtaattttcttgtaaattttataaaactgaaacctgcttggtagtggtttctgtgttggtttttcataactaagtagcaagtagagaggagaggttgggacaaatggatctcatacaatcaagtgtgcatctcttgtttctcaaggaacacccccacctcaagatccaaggcagcagttttggatggaatactgtctgttgaaagccaagcctccacaatcagggcagaccacaatgaatgtatgtatcatttagtgttttgaatcatgtacttaaaagaatatttctatatttttctattctgaattctcctctggcaagcttctctggcgtaaaagcattttaaggatatcaagagactttaagaataggaatctcagccaggcattggtgtccgcacgcctttaatcccagcacagtgaaggcagaggcaggcggatctctgtgagttcaaggccacaactgttacacagagaaaccctgtctcaaaaaggaataggaatctcagtaaattttgtggacatactttcctttggacaggatggactagcaaaataaattaccagttcttcagggaaatccataaatatatatattaaatacttcaaaattttgatatgttagttttatacaaatgaaaaggtagtgttttttgagacagggtttctctgtgtagtttggaacctatcctggaactagctgttgtagaccaggctggtcttgaactcacagaaatatgcctgcctctctgcctcccaagtgctgggattaaaggcgtgcaccatcaccacccggctgaaggtgatatttttactctgggttccagttagatcaagggaaagtggatatatgaaatatcttctcctgacccatctcaaacgaactaatttgtttaatcttcctaacactgtgctttgatggtgttatccacgcctagagcacaaaccctctgctatcacaccgtttggcctatcatagtgtgggtagtgtccaggacaagcttgagaattttgccccaagattaagaatatgaaatgcactaggcatggtgactcatgtctttaatcctagtactctaaattgtgggccatcctggtctacatggcaactccaacacagccaggattgtttcatatagagaccctgtctctaaaacagacagcaacaacaaaggaatgtgaagtgtatgtttattgtaaacatgtaaagtaaatcccaacatgtaaagtaaaagccagattactcctttcaggctctgttgttaacaatttaagttgtcttcttcctgaactttgttgttgttttttccccatgtgcagatctgatggagaccccttgggtttcctaactcagatctgtactgactgagttattccagggtatgttttgtatgtatgtaaaatttttagagtagtgtttggcattatcagttattgattcattatttcttgtgggtattgtatttctcttcagtagacatggcttagagggtcaaagaccacacagagactaatttttttttttttccatcaaaggttggagtacttcatgtattcagagtgggaggtggggttatggtgccaaacatggctgtaaatcatttccccttgtactaataattatattctaggtatacaaacaccattttgtgttaaaagtataggattatttaattacgctaaatatagacatcgttttcccctttgaggttattgtgttttatgtcaatcacatatgccaagcctcatagtaaaacacaaagcttagacaaaaagaaagagggatttcctttttaagtgggccataaacttaggaagggccaaagaagacatttgtactcacttggatgctacctcaaagcccaggttgcagacctcatggaattctgtaagactcaatgagggtggctgcttttctagagtctgagtccccttagagtacatactatcatagtaaactttcacaataatggcaaggattgtattccaatttgggaaggccaatgtggctttcaagtgtgaagttatcttccatgtttgcctttgtggggagagggtacatattgtttcaacttgatactatccaagaaaacgggaagccctggataggtctttctcttgaagccaccacaaacctgtgacagataatcttaaggctaggtagtctgttgctttcagaattttatgaatcaagttttgggttttggaatgtaagaagttactaaatgtttttgttttttgttttgttgtttttttttttcagctgtggccaacatggttgaagatgttgaaagctctgggcccaccagctccaagtgccctgttacctctgatcatagccttgaccagaaactaacattaaacctccaagaaaataatgaaatagaagctgatgtacatgttggcttaccagaagaaaagcctcaaatttctgtcagtcctcctgatactcaagagattcatgtaaaaatattaatttttttaatgctctataagttttcatttagttgggctttaaagataatcatttaaacttagtatattcatttgacaatataaagatctgctcaaaaatagaagatgatatagattgattcttatgaaaaaacaaattataagccaaaatttagcaatttgcttatttgctttaaatgcaagtttcttagctatcagtagacatagtgactacttgacatgtagactccatctgtggtaagtgagtatagtgaaacagggtctccctttatttctgtgggagaagacattagagaaaagggttcttttagtactctatggacttcctgctttcctaaaatcttatcaaatcccttcattgtcaagggaactttcagtaaatgaattggagattaaaagccaactcttctaatcattctaattacttgtagaaatctaattgtatggaattgggggggttataaattcatccacattcatcttaagtattctctccctgaagtaaatggcattgaatttcctatttcctctgtttggaggctaacaagaatgtgggtgtggtgtaatgggacccctcatttctaggttgtgtccatcctgtcagctcactatgggagtgggaaaatgtctttgtgtaggttggtgataatgtcttccttctcggtcaggagatctctctgttactttctacctcctcctttttctccccttccctcttaccaaaaggtaaatgcaaggaccattccttcttccaccaaacccttgcaggagaggtactgaacttgacagccttaggaatttcatggtttgtgcaaccccagcaaagggaagaagattgagtctagcccaagggagcttatgtaggtgaattgttcttcaaccttatggggatcatgctgtctaaagtgtgaatagttaggtaatttgggaattattgtttggggttatttccttttttctggttgttttttcttagataagtgaataagtttttaattttagaattgttagcataatgattttcaagattttattagtactgtctttttagctaaggaaatgtggaatttctagtttaattccaaccataatctcaatatctttttctgtgtagttattttgactgaggtttcgtttcttaagtgaatatttcatgaagtaaacccattagcatatgccataagtatagtttgtattgtaaaatggacacacaaagagtgagatggtcattaaaatcctgtatgctttaagttaaaatgtattttttatagttcattaacttgtttcttatctttattttagctgattgaacatgaaaaacttgaagttcaaaattcagaaaaggaagccaagcctctttcctttaatgagttgtatccatcaggaacacttaaacttcagtataattttgataccattgagcagcagttttgtgactcgcctgatgataaagactctgctgaatgtgacatcgccgaagtcgacggggaactttttgtggcacagagcaactttaccttgatattggaaggtgaagaaggagaagttgaggcaagtgactctacagcaacgaatatgtcatcaaaagcaactaacttagcaaccaaggagaaacctgtgtcccaagtggaacctgataaccaagagcatgttacagatttgccatctgatgtaactgttaaccccaaagtagagactttaccatatgtgcctgaaccaattaaagtggcaatttcagaaaatttgttggatgtaattaaagacacaagaagtaaagaagcaacgtcagccacagtggtacaggttgttaatgaagatgtagccttaataagcccaaaggttacacgttcctccaagttaacaaagtctacactgaagactgttcaggaaacaagtgctgagactgtaaacaccaaccacggtgatgacatggtttctgctagaacccgcacaagaaggcagcatgcccaaaacctgaatgtcacaccagaacaacaggagtcctcagcaattgctactcctaagaagaaaactagaaaagtaaaagaatttcctgggtcttctgacagtacccattttaaaataagcatagcatctgagacacagctaacccctcaaaattctctcactcctaggagaggaaggaagaaaagggaagttagccaagacacactaacaagcccaggcactgtgaagcaggagccacagaatccgccagaaaggctgagaccgcaattgctggagccagccactgaggaaatgccttcaagaacagaagacaagctctcatctgttagaaaagggactcctagaaggtataagaaatctgtagaaaatgagcaaagtcctaacattgtaagagatctaaacatcagtacagcagcaagtcatagcgggaccaacaaaaagaggaggaatactaattcagaagattctcaaaatgtagaatataaacaggaggaacccagtgaccagcaacggcctcttaaacgaagaagagtcagagagagagaagttagtgtgtcgagtgtgatagaagagcctacacttgattcagcccagttgccaactcaaacagaattgaatgtgccggccacacctaggaaatgtggtagaccaaggaaagtagtgtcattagaagatggtggctccagggctgttgagggacagaaaagcccccagaagagagaagttttgagtgtccgaagatctactcgaaacaccccagctagaaatgtgagtactctagaaaaatccattttagtgccaaatgaggaagttgctaaagtgatgacctctaataaaaaacctacaaagaagtctgcaaacgaaagccaaaaaagtccattaccagcaatatcagacttcaaggctgaaacaacccacaaagagccagctaaccaggaggaaagattgcttgctgctgcagcttcgactaaatcttcctggagcacaaggactaggtctagaaagaccatgttgttgacggacttttcagaacccaaaactgagcctttattttctcctccttcagtgaaggctccaaagaaagcaaaaggtatttattctttacttttatcttatttagaatgcacagcctaatatttggttgttaaaaagcacttttgagttcattatttgagttgaagcactaagtgtttttccttaaaaaaaaaaaaaaaaaaaaagtttataattaagagacagcacacctacccacaaaaacaaaccctcaggtaaaggtttgtttactagtagattttcaggttcaagattatccagagattgtgtatgactttctatgtgccacagtctatttgacataggttttattgtttcccttcaaatacaactctttttgagctggatgatagtgacacgtgctttaatcccagccagtctccatgacttgaaggccagtctggtttacagagcaagttccaggacagccaagactacacagagacacagggtgtctctgtgtagaaaaagtaaaccaagaaaaaggccttttgtagcccagactggccttgaactcactgtgtaactgagaattacttagaatttctggtcctcctttctttacttcccaagtgataaaattgcaggtatgtgccacctgtgtggcctagaatcattgttttgttttgtttaattggagtaccatagcttttggcttgtgtcccagtgacacccataaatccaaactgttttatgggcagctaatcaacattttatggcctgggtcaacagaaataagtctatactcagtgttgccgtgtctcatgcataatctctcattgtctttgatgagtatgtcacatggttgataaagctaatgataaaccatgtgatgctctccctttgagagaataaagcttgtgtttatgtggtgtgcatatgtgcatcaagtaacagataggaatatagggtatctgtggtgttagaatctcagtgggagaagtgctgcaaaaatgtccagaaggggtgtgatgatgttcagatcagtgcagctgacctgtatcattacagaaacacttcgtaaagttagtgtcagtaattactgacattacagtttaaaatttgaatttcagaaaagcagttgatagctttattcatttaagaactataatactgaataaggcaactcccttgttggtgatagtggaacactcctttaatcccagcacttgggaggcagaagcaggtggatctctgagttcaagaactaacctacaaagtgagttccaggacagccagggctacacagagaaaaccctgtcttgaaaaggcacaaaacaaaaaagaaacaaacaaaaatcttccatctagctgggcatagtgatgcatgcctttaaactcagcactgggttcctgcaggagatctttggttatgatagcaccaatttcctttctgattgcttgctttttatttacactttgcatggagaaaaatgagatagaaaaatgtgtaaaagttttaagctgctatgttagagaaagttttaaaatgaaaaactgaaattggtaaaatattgttaatatttgtattttctttagagcttaaagtataggtaacaacatttttgttatgcttagaatagtataacaaacatcttagttattctttgtcatcttaacaaaattttcttgatagctggttttttgtttaaaatagtacacatctactatagaaacttagataataaaacataggttctagttcctagaagtaaatggggaagcttaagtggactatgaggtgctctgaggaaagtaaagttgttgttccaggtagcctagaaagagtgttaggaatacaggcagatttgtatttttaacagtaggaggaagggtatctgaccacttcagtggcatgaagtgtaatttctgcctcttaaaagctggaagctgccagtgcttttctttttttattaagagccatgacttttgtgggctgggagttggctcaggcagtaaagcacttggctctcacccaagatccatgtgaaaagctggtatagtacacaacaatggtgagatgctcatgtgccagctaacctggtctagttgtggtaaagttcagtgagagaccttcgtcaaccaaaaggtgaaagacatctgaggaccagcacccaagacatgcataaatgcacaccggcatatacacaagagtgtacacacagactgtcctctgatgtccatggatgcatacctacttccccacctgagtgcacagagagttgggatttggttttgttgttggtttggtggatagtggtggcgtttgctttgtttgaggctatctggtccccaaacttgtttctttcttgcctctacctcctgctgaaactataggtatggaccttcatgtcagccacagtcataatagcaggatttgacatctgatgttggtcagccagtttgttcgtgtatgtctctctgtctgtgtctctgtgtgcatgcctatcctgcagacattgttatatgagtcagattattctgctcatcacagaacggttgttctgaaacagttgacatctgtatcctattttctattagctgagacacagttaaagcccaaactctggcatgtaatctctggcacacaacactgttgctgccataatcacaatgtccttgttacagagaccttatttaaaaggttcagggtctatatggtacatacttttaattgtatgttttgtatcaacttctttttaaaatgtcttcattggaatgcattagttatacatatgtatttcattatcacattttcgtatatgtacatactgtattttgatcatatccagcccacctcacttgccctttcttccccttcctctcctcaactggttcccattagttttacttcttttttttattattttgtgtgattcaattatggcgtggtttacaggagcatgcctaccttatcagtgattattccattgggtaaaaaatcatctccacctctcccatcaacttaaccatttaaaacctcagggaggggtaggtgccgttgagccccttcccaaatcaattcttaaacctccgagttacagcctcctatttttcagcttaagtttttgcttttatgacttgaacttttctgttgcccatctgctcggaataatgtagctggaaaggttttaaagtgagtctcttctttgcaaataaaattcactgtgtaatatgagtctcatctaaaaattgagacacaccgtcttctgggattcatgctttcctgagaggggctgaggaaccctgaggatcaaactaatgagtgatagttgtactttctagagtcagtcttgatgtggtagcagtcatttggtttacttaaatgataatgacatccccccacacacacacataatttccgtctcctgacatgggtaatttatatgctgtattccttgactggggatatttttgtctttctagtgtgtttcatttattccaagctttttggtgcagtatatataattgtctttatgtgtttgtttttttttttaaaccacgcatagttagagctgagtgttttgtttcccatttgtctttagctgaaaaaatggaggccactgcccagctgaaagagttggtatcagatttatcatctcagtttgttgtttcccctcctgctttgagaaccaggaggaaaaatgtatccagcgcctccaagctactagatgaactggtaaggaatgtatgaattatatatattcatttaaacatcctcggtgcatattatttttctgagatagactctttataccccaggattgtcttgaagttgtgatcttacctctggttcctctgtgctgaaattataaagatttttaagtgaatttctcctaagtaaatttgttgaaaaataattaaagataacatgtgagccagcctagctgtccttgcaggggactcaggctcagttcccagctcacaacttctaactctagttctaggggatccaacgctctcttctgaatatggtacacatgtaggcaaaatgacacacaaaataatagtagtattttttaaggtaatttgctcctggtggtgatgaatgaggggggggagggataatttgcattgcatttatattaaaagtacaaaactgtctactaccttcaagacagatctgtgtgtgttacttataacagcagcagttttctagttaacctgtttggatgacagttttaaaattaaagtggttgccaggtatggtgacatgcatccctaatcccagggctcaaggtagaggtaggcagctctgtaaatcatcaccagcctgctctacatgctgagtcctaagccagccagggatgcatagtgagaccccatcaaaattatctgggtgtttatgtaagatactggtgtgtcattcaaagagcttcctagaaaaagtttcagaattgagttcacagtctcttgtacacagccttaagatggacatttttcatagattaaatctatcctgtcttagtgaatccaaagttttgtaactaatttactttctatcatgactaagggaaaatgcaactatatctagtcttcaactccatcaaagaaggcccagaaggatgtaatattacctaacaacagagacatttggctgcctagacagtcacccaaaattcctctgcaacattgggttatccatcttcaccctacaggcctagggtgtctggcagacttttcagtgaggcaggaaatttgaaggactggcctaccttgtattggcaaagttcatcactccctttcctgtgggctctgaatgcccagtctgcacagcacatacgcaagcagttaaggcaaaagcagtttcttgcccaaatcttgccacagtgaaataaactccaatggaatttcttgatggccatcatccttttatgaagtaaactggtgcttccaggagcagatgtgtctcattgtcttgaaaagccctaagttaacaaaacattttaaatgccatattctgtatttttttttgaagtgtttgaaaagcatttctctatctaaagtatacctctatgtgatcttgagcacatccctaacatatctacaaatttgattgttatagaagaataaccgctgacttgtgtttcctaagtagttcattgtaatcactttcaaaacctataattttaccttacatttttaaatgaactgcataagtacaatacttaaacaagagtagaaacatacatacagtatgttgtaacaaaaaagaccttaaatttgtatcagtatacaaaagtccataccaacacaaaatatttgagaataatagttgttttttagtttaaagtggattcaataatctaccctttatcttatcattcctgtattcccctaaatataacgaacatccatgacccactagttaaccaaagacctccccacacacacacccaactcttgggagtgtgggcatcattttctctagaccacttcctgcttaatgtgggcaaagcatcctcagggtcccctgaggaaatttgagataatgatcaagtcctgggaagacgagtgttccgtcacctttgtcgatggctatcacctgttagtaggtctccctgatgaaaccagatgcatatcagcctggaacgagtccacagcctcttgtttcctgtgggaacaaaagcaaaattgcttctccaaaccatttttgattttcatttgacaagtacatttttttgactttttaaattttaaggtagcccgaaagtatctaggttggttcagttttgcggtcctgtatacaatcccatgtcacttagcagatgtcttttgcccatccgcattcaaaaaaatcaacacaatagcatacaggatccagactccttgtgtatttcccatcttatgtggcttttttatattacttttactctctctttaaagactttattatttttaaactatttctatgactgtacatactttttctttcttaagcctggaacctatttacagtttttttttttttttccagtctgtacagacctcttttgcttcaatatcttttagcttttttttttttttttttttttttaagacagttaagctcacatgaatcctccgcatgctcccacagctcaatctgccagctgctcagttcatgagagcaaagcctaaagcccaggctcggttgagggtaggtgatcaagactgcattcagccatcctctagaatgccacaggcatttttacttcttttgtgtgtgtatgtgttcctaagtctgcttaagggctcaccagcaggcaaaaaacctttgttgttgttgtttgtttatttttagtcaggtgtagtagcacatacctttaaacccagcattcaggaggcaggggcaggcagaactctgaattgaaggccagcctagtctacagagtgagttctaggacagccagagttacttagtaagaccttatcttggggggaaaaaagattaatataaagctgttttattttacattatgcttttaagaaaatgaacagaatgtctcccttctattacgattaatgactttatcataactaaaaatacaagcatatcaatgttactgcagtgttggtcataataccaaagtaaggaaccaacctgactgtcttagcagcacaggagtgaatagagaaagtgtggtgcatacctacaatgcggtgcctttcagacatggaggaggagattatgccacttgcaggagaatgtagatgatcacaaaagcaaaatttaagacagtcccaaatggagaaaccttgtttcatgtgtggtgtttagattttatatagatacataaaaatcacacgtgattaatggcatagcaaggaaatactggaccagggctaactccaaactctgcatctccatgtctgatgtcaaaaacttttcagatctggcagaaattctaaaaggagccataccccccccccaaaaaaaaaaaaaaaaaaaaaaaacctcagatcggaccctatatggaaatacagccccacattaatacgccaaaatgtagttggattttcttttactctagccccctatcgggtgccaaaatgttgttgttattgtttattctttttcctgtttactcgttgagggtcagctgcccagctcccaaataaatcacacacatggaaagacctattattacttataaaaacccaaccttagcttagccagctttttttaaattaacctatctgccttttgcctctggacttttacctttccttactttcactcttactctgtgttttgctgggtggtaggaccctgatgtcctcccctccttcttgttctttctatttatattctctgcctgccagtcccacctgtactttctcctgcctcgatattgactgttctgctctttaatagaccatcaggtgttttagacaggcaaagaatcacagagttaaacaaatgcagcaaaaactaaagtaacacatctttacatcgttagacaaatgttccagaacataaacaaatgtaacacatcctaaaatattctacaaaaaacaattcaactggcagttggataaaatgccggttagggctggagagatggctcagaggataagagcaccagctgctcttctagaggtcctgagttcaattctcagcaaccatatggtagctcacaaccatttgtaggcatttgcaggcagaacacataataaatcaatctttaaaatgcattttaattgacagaaatgagtaattagtttgaataaagtctttcagccccgaacctctgtatatatagggataggggtgaactttctgtcagaaaagcaacagcttcaggaattcataagcatggcagggcagtgctaccgagtagacgtgtaggtttcagatagtttctgtggaaagtattctgggaaggaggaaacccatctctggtgacccggtgccttcaagatgacgagaacctggacttacatgcagctcaaattgtgttaactcagggcagtggacactggaagcacaagacttggagaatgggcaccttgtggaagtcgggaaaagaacagttcttttctagattatcacattttctactaaagagctagaggggcctgtctaggacctggggtttttagtgatgtttgactccttaactgagcaggatacttttttgggggcggttttgagacagggtttctctgcagccctggctgtccttgaactcactctgtagaccaggctggcctcaaactaagtgattcgtctgcctctgcctcccaagagctgggattaaaggcgtgggacaccactatccagcccagcaggatacttttaaaatcagactttaggtggtgtacatctttaatcctggcacttgggagacagacatctctgagtttgaggccagcctggtctacagagcaagttccaagacagccagagaaggagaagccaacagagaaattctgtcttaaaatcaaaaacagaaaatttttaattgcttaggcaatttatattttctaatttttaatccgtaggagagtgaccctaaaccactagaaatcatagaagaacagaaaacaagaagcaggactgtgaagacaaaagcaagcaggtaagcctttatctggagcccctaggaaagggggcttctcagacgtgcctagcactggctccttacattggtagacagcccagtgttgacagtaactagcattctccacagagtggagacgggtagcctaagtagttcattgtccactgtgtgggactgggagagaagatagtttgttgtttcattagtggcaatatcactgtatctgcggtaaaattagtccatttgagatagttttgtttcacagtattctgttcatgctgtacttaggcatggctatttttagtaaacatacaaattaataaacacgatgcagttgactaatgacactactcatacgtaaattgtcaatgtgtttatgatatacatacttaccagttgctactctttttgagtattacccccccccttttgtggcacacctaaagctgaaccctgaattgcctccccccttttttttttttattcttagagtaggtctttagaacatgtagtctttgctatactggaacttgctaagtaaaccaggccaacctcaaactcaacagctatcctcctgcctctcttaactgagtactggaattttcttagccatcacacctaacatcggaattggaacttttttgttttgttttgttgagacagggtttctctgtgtggctttggaggctgccctgtcactcagctctagaccaggctggtctcaaactccacctgcctctgcctccttttgagacacacacacaacacacacacacacacacacacacacacaccacacacacacacacacacacacacacacacacacacacacaggtctcaaactccacctgcctctgcctccttttgagacacacacacacacacacacacacacacacacacacacacaacacacacacgtctcaaactccacctgcctctgcctccttttgagacacacacacacacacacacacacacacacacacacacaggtctcaaactccacctgcctctgcctccttttgagacacacacacacacacacacacacacacacacccagtgctgggattagaggcatgtgccataggtatttgggccatgcttgtaacgcagcagtgttcatgcgtctatgtagctaagtatgtcagcgcacatgggcatgggtgggggctggcactttaaccctgcctgccactggcccacagctgtactttggctgccttcgcctgtctgcagaaggaagcacttgacactgtgctgctcctacttgagtgtatctctctttcagaaacacaggaaaaggaagttcttggtcacctcctcctgtagaaattaagctgatttctcccttggcaagcccagttgatgcagtaaaggtcaacaaaccaagaaaaactacagaagcagcaggaaaaactcttggaagaggcaaaaagaagctgtcttcctttccaaagcaaattttacgcaggaaaatgctgtaatttttagcccaagattttaacatgtaccgtttgtaaagtcatcagtatttgtgtgaattattaaaagtcacctgatttgaaaggaaataatttatataaattgtacaattttgtaaacaagtaaataagtaaagtaactccatatggagtggggttcttctagttcaggcgttttataaaacttcatacgtttatataatatgtaaatatggcttattattaggatgttaaataaactactgtaaagtatatactgtgtgtctgttagatttttgaggggatttctgtcttagtcgtgattttatatgctactagacatttgtccattttctttctcattgatactagagtcagtcttacaatgagggtgggagactgattcttttttaaagttgctgttttataatttatgcactttgagtgttactcagatttctaatcattacatgtactttccttggactttgcctgatagtgtgttgaatttggattgtgggcatgtgattgcctttttgtagttttacaaattttgtataatctacctcaaaagagtaattttccagtactgctttggttaactataatgctggcatttcttgttcagtaacttaaagactatcttgtctctcagttcagagactaattatccaggttagattgaccggttcactgcttcttagcaacctcatggaaggatttgagaaggagatgtgaataaatctgctccagataactcagtacacctggtgtgtgcctgatgttgagaagaggggtccggaccaatattagactgactacccatgctgcgaaagctactgaatcacagaagcctcttagtattcaggttaaaactgcaattaccacaggacctcaggcacagattatccagaatggaagaatgtggagtagccgtggaaaggagaacaaaatgccctgttctgcagtatgagtgtgcacaatggaggctatgaaattcatgaataaataagtgttgtcaaataatttatggcaggtaattgatagtgtgtaatgaatggacccttaataattgatacctagaaacagactacctttgtcagctaagctttggatgttttcgtgtgaagtgtagcagtgtgctttgttatttttctaccaaatagcattatggataatgagaaaatggggaaaatgcctgtgccgagcacggaccgtgtgacagtggcggtgcgggtacggcctttcagccaggtcagtccatgttcattgccttgttgacaattactgcctgattttattccttttttaataatagtttctgaatttgtatttaagctgcttgtcatttatgaaatattaaacttatttaaatgaatttgtcaaatgaataacaaagatctaaacataatttagtaaacaatttcattccttggtacaagtagcacaataaaatactgacacgagaaatactgtcaataattatttaaaccagtgcagttttttacataaaaatgtgtgctatctgcttttaatgcatgtacgggggcagaggtgtagctcagttcacagtgttcacctaccataaatgaatcccaagggtggctcaccagcactatgtaaaactggtgtggtgatgtggagatccagcctgaggagggagaggcagcagactaagctgtccttggctgtgttgtgcatctacacaggctacatggaaccctgtctcaaaaacagtttgtcttcttaaaagtaggtcttgcttgcctttaatcccagcactcaggaggcagaggcagttggatctctgtgagttcgagaccagcctggtttacaagagcgagttctaggacagcctccaaagtcacagagaaaccctgtctacaaaaacaaaaacaaaaaaagtaggtcttgccatgtgtggacatacatcagtgatctcaacacagaatgctgaggtaggagaatcaacaagagacctaagtcacagaatgagaccatgcccagccacacttaatgttaatgggtttcctgcaaatctatagccttttatggaaacactgctgctcctgatctcatgtgcacaagacccccttccctttggctgtgccccatcctacttgggaacttggagaggatactgtgttgtaatgggcttgccaggtagagaggtgcactgtacccattgttacttctggaacctgccttccacccttttcgtaatgctagacttgtctttgctcactgtgaccagtgaagttttgttgctatacactgccaggaagtgttaattctaagcacctatgactccagttcctgggcagctgatgccctcttccaacctccacaggcaccgggcttgcacatagtacatgcaggcaaaacacacaaaaatctaaaggctaagtatccagttgattttctgcatctttcctaagctaggaccaaaaacatagaggtacttttctgttcttgcctaggagcccagctcatgaatctacaaatagcagctaacttgactggcacccctgataagaggttacctcctggagcctagaatgtcacagtgtgcctttttaaatgccctgtgtggctcctgttttcattagctcatactgtgggcataggcctcacactatatgaggaaggagaactttctagttctgtaaaccctgtacatcttttccatacaggagatagaggagtgtgcaccctatacaccaccaccactcatccacacacacctacacacaaacatgcgccccaagtcacaaacggattttattcaccagtcacccctaagagtgtctcagatatccagggtcctactgtgtcctctaaagggctataatctttactgattggcacagtatcactatagtagacccaggtcttaccagcaagaaaaagtaccaggttcccaaccagtcctctttgtgatagctggcctgtgtagctactcctgggcagggcctaaaatgtccaattctatggatctaattataagggatgctcaaaatgctatcccctaatatcagggcagcatgcacaggaccaagagaaggtagtttcctccagcatctgtgtatagtcaggatgggaggtgtcttactgagccccccacaaatctaccctcttccacagtctttccaatcccatcaggttcattggcagcttatgttacctgcctttactgtgaatgccccccctccccatggtacattgagtgctttgaacatggaaatgccccccaccctgcatgtcagaatgcttgcttcccagccagggacagtgttgggaaatcctggagccgcctttggggcagggcctcgtgggcctaagaaagctaccaagaccttcagcttgagcttgcttagaattccatcattgcatcctgatctgctaaactacgaacaaactgccacaagctcctgtcaccagtccccccagccgtccccaccatcgtgcctagccctgacacagcccaaacaagcccttccttaaatcactttgctcaagtacttcgtcatgggcatgagaaaagtaactacttctgggtgaggaggccaagggtcccattgcaccttcaattactgcctttacaacctgagttttgaattgttccttttcccacctctgtaatgtctctcctaatagagtatctaacccccagaatattctcagggaccagggatattagtacaaaatagaatagaacaaaatgttctcctaattcccaggcacagaaagaacacttgtttttctctgatggtcttagcccctttaccacctgtttactgtacaaggccctggaaagcaccgtcagttgccatgagcccatgtgcctgcagcgcctgtatctaccagagcaatggtctccttgtctttgtaggcccagtgacatagtgagttccctgggaggactgtgtcaccctctaaatcttattctgagatagaatcctggtctacctcttgtaacatggacttgagggacccattcctctgccctacaagagtggggcagcagaggggaaaggtgagaactgtggcttgggccttacttcccatctgccaggctaccaagatcacgctgggagtggagcaggaatggagcaaaccacaccacaccattcctgttttctaacccaagtgccacacccccctttccctttcatttttgcctgttctttctctcaccaggtgttatgacaattataactaaaaatgtgtgcacagtttctcaaagccttgtccccatcataaagggggttagttagttttcttaccatgacaaaacaccatgaccgaggcaacatataaaaagaagcattcaatttggggactcatggttccaggatttagcaacatctatgaccatcatggcaaggagcgtggcagcaggcaggcaggcaggcgggcatggcactggaatagtagctgagagacatgtgaagacaaccacaggcagagtgagtgccaattggaattatgggggcttttaaaacctccaagcccatctgagtgacagctcttaatcccaagcaggtcaactaactggggactaagcatgcaaacatgagcctgtaggggccattctcctttaaaattatcacgagaacagaggatgggggacggatatgggttctctgttctcaggaggtagttggtaagtctgtttttcattctatccataaaaatggctttcttgggctggtgagatagctcggtgggtaaaagctcttgtgcacaagcctaatgacatgtttgatccctagaacccacagtggaaggagagaaatgactcccaaaagttgttctctgatgcatgcatgtgtgcacacacacacacgcccaccatacatacactaataataaaacgaaatacaataaaaatggatttcccaggccctggaatctcctgggcataagtggcttctctcatccacacacagtgctcacaaaatacccaagacttcctccatgcttgccctcagctgcccaccctggcacacccctcttatttggccaggtttcttttatggtcatatcgatcagttctactgtggaccgagttccttggatctggcaggcagtctggatgctccttctcaggccagatgatgggtaatattgctcctctcacagaaatgccattcccacattcagagtgtactcacactggtaaggttctcaggaatacttgttgaaaggattttgttagccaggcgatgttggcgtctgtctttagtcccaacacttagaaggcagaggcaggcagatctctgtgagttggaggccagcctggtctacagagagagttccagggcagccagggctacacagagaaaccctgtctcgaagaaccaaaacaaaaagattttgctagctgtctaggaatcctgccacagtgccatcttgaacagtcccgatttctgtctccattggtacacctttgtgttaatagtcacagaaaagtgggggtcaggagaaggaggggtctcagtcctcatttccttcaatgcgtttgaggtggcagttcccggattcctcccccttgtttacctccggcacaaagctggtcgctgggattcttcccctgcatggcacaggctgtaactctggtgaatttttagctctgttgccatagccatctggactttggtggccatccagttcacagaaacaaccccactacagtagaaagacactgcccttcctttggacagcagtgcaattgacatttggcaaatagctcttcaaaacctagcaatgcctttggggtacatttgtactcactgggacagtcacaagcatcttccatacagacctccttctcatatatattatattcttctctgtgtgccctctcgctcaagcttccgttctcttgtccagttcctcagttttctggttgacttgccaattgttctagaaaaaaatccagtctcaatatgttggaactagccatgtgttgccatgagacaaaggaagcagtagggattggggctgcagagtgagccttacaggcagaagcatgggcctgggcagctcctgcagttctgctcagagaaaagggcttataaatcaggctttctcaccattctgttgctgtgaagagacaccatggcccaagcaacacataacaaaaagtatctaattgggggctgcttctagtttcagagggttgagtccatgaccatcatgtcagggaagacggctgcagtcatacagacatggccccgggaaagtagctgagagcttacattcttttggtggatgatgggaggcaggattcaatacaggatttctcttaacagccctggctgtcctggcactcacgctggagaccaggctggcctcaaactcacagagatccacctgcctctgcctcccgagtgctgggattaaaggcgtgcgccaccaacgcccatcgagagtttacatcagatcagcaagtcagaggcagagaaacggaaagtggagagggtgtggctgtgttgaaggaggtgttgttgcttctggtgggccttgaggtttcaaagaccctgccacagcatccggaaaacagacattcaaatatgagcccactggggtcattctcattcaaaccaacacaagtgtttgggacaagtgactcctagccagaatgtactgtgattctgaatttataacctgactatagagagagaagaactctggaagccaatgtgtgatttccatgcattcccaaagcaccaccatccgagaccctaagaacagaggacatttgaagaccttcacctttgacctggcgtattggtctcatgacggatttcaaaaggacgaagatggcgtccttattccatctaatccaaccagtaaattcgcaggccaggtaagtcgcttagaaatgtcaatggtagattgtgttttgtgttttcttttctgacgcactataaacacttcagtattgtccaggccagagcagggagatggctcagttggctacgcacttgctgcggcagcgtgaggacctgagttcggatcctcagaaggcgtgtgaatgccgagactcgctcctcagccttggtgcttgtgagaggcaagacctgctggaggaactctgggtactggcatgtccttgaagggaatgtggggaccccctgcccttcctaccttactctgctttctagcttcgggcgacgagtctcctgccgtgatacattgtcccaccacagacccatagcaatggggcctgctgagcattgaacctatgagcccaaaccaatcttctctctataaactgattacctcaggtattacagcaatggaaagctgactagcaatgaagtcaaacgaagggaagtcttccctctggtcatacagggatgggtgggaagcactggaaatgtcattccaagatacacgagactttttagcatgcagataatatattcacactctatcccagtgcaagacgacgccagtaaaaactctcagtttataaaaatgaaggacaagggtcggtgacttgccaccagcaccatgtatgatgacctgaattcagtccctgagaccaacatggtggaaagagaaaagcaactcctccacacatgaactgtggcaagcacacacatccttccaatacacaaatgcacacatgcacacaaaataaataaaatgtaatttaaaaaattgtaactaagaacaaaaacaacagcaaaaatccctaagattccaatagtggctgggcagtggtggctcacgcatttaatggcagcaatcaggaggcagaggcagactgatctctgtgagaccagcctggtttacaagagctagttccaggacagcctccaaagccacagagaaaccctgcctcaaaaaaaggaagaaaggaagaaagaaagaaagaaagaaagaaagaaagaaagaaagaaagaaagaaagaaagaaaggaagaaagattcgaatagtgtcaagtaggaaggatgcaaaatgactaagcttggtgatcactcctgaggtttacccagtagcaggctgaatagatgctcagtgggtagtgcactggctgcccttgcagaggacctgagattgtttgccaggccctgtgttgaatgattcacaatcacctataactccagctccagggcatccaacaccccaccctggcctccaagggcacctgcatacacacacacacacacacacacacacacacacacacacacacacacgtaaaaaaaaaataaacctgtggacaaaagagctgcagataacttcattcagatatgctttgagtaaaaatacagacaaggtgttcctgaaatctataggtcaaattccattgatcctagagaccacacaaccctagaatacaataactctttattgctgtttttttgttttgttttgtttttttgatacagtgtctctctatgcagccctggctagcctggaacttcttgtatagaccaagctggcctcaaactcacagagaccctcctgtctgtgcctcctgagtgctgggattaaaggcgtgcagtttttattcttttctatgagaaacaaatagtattttttgttttctgtttagaaacagggtttctctgtgtagtcctggctgtcctggaacttgctctgtagaccaggctggcctcgaactcacagagatctgcctgactctgcctcccgaggtttaagggtgtatgcactaggcaactttctgctggtataaaaaaactacctgcgataatgcactttgaagagcccaggcttcctcggttcattctgtgggtactagcccatccctttttcagcctgtggtgaagtaatgattacagcaggcagtgctgggggagcgagaggcaaaactccagatctcatgcaggacatgaagacagaaagagactggggtgtttccacagcctcccagtgctacccgcctcggggctaatgctttgacacatgaacctttgggtggcaccctggatacaaacgacagttctgtggaggggggtctgtgttgtgagagtgtgtgcacacattcatatgtgtgttgacgaaatgctttagagccacgatgactggtgacgcttacaatttcctttctagatccatgtgttccatgacatcggaaggggaattctagacagtgcctggagaggttacaatgctactctcctggcctatggccagactggctctggaaaaagctactccatgattggctttggcacaaacaagggtattattccaagggtgtgtgaagagctcttccaagctatgaagacacagaagaaaaacatagaaccccaggtatgcatccatattctagaatcctttttcttgggaactgcaccttttcatttccacaagtggaaggcaccagcgtctgtgttttcaggtgtgtgtgtgtgtgtgtgtgtgtgtgtgtgtgtgtgtgtgtgtgtgttgggggatattccatcacactgtgaatcctgagttttcatttatgttaattaaataaaattaaccttgggtcaggaggctgagttagcaactagttgacagaaagtaatcatagagcctcagagggcttccaagatagagagacacaggaaatagtagggtagggtttggagtagcacaggtttttctgtttgtcaaagcggaagcatgggtcttctgcctctaccggtaagaagagagggttaactagttgctactcagtctctctgcggtctcaggttttcaccccaacctttatctcaagtcttattcctaattgaatgacagagatttagttaaagctacctttagtggcagtgacagggtggtgcccgtgggagcagaattctcaccaggctgctgcctgagtggccaggccactgctaattaaacaggcttttaactactgagctacaattccaggctgagatagcagtaggttaaggctgaagttaaaacaccatttgtcgtccagtgttgagcccagatttccacatagggcctgcaaaagctgacccggattgggtggggatggggagtggggataccgttcctttaaaaggcgctgctgtgcacactaagtagaaacaacaaggtaagtaaaaattgcctgccacagtgtgggaatcaacttcctagagctgatgtggttaaatgctgatctcagttaaacacagtcccaggaaaacgcagctcttggtcaggcccaggggttaaggcttggctctcactgacaggagggagtgagtggagtcaactgccagggccacgtggtggagggcctagcttctgcttagcagtttaaggtttggctaatagggtcagagaacgctacaggtgcacagtaagacaggtgcagactgtaaaaactcttaaacaagttacagtgtgtgtaggtgcttaagaaagaaaagaaaaataccaactacaggtgtgtcctaaaataggtacatacttgtcatgtatggtgataggagtgttagacccccggaaaactcaggtactggggtcccaggccacatcttcggtcaccccaatcaccaggcagattcgagagcttgctgcaaactgcatgaggctttattgtaatttaatgagctaaccccatgttagctcaggtctttcacccacccgccatggcagatggctagcaaagacagctcgaacccactgcgtacagatctttatagggcagcgtaaggggagtgtctaggggtatgcacaggctcaggattggtgtgcctccagccttggagggcttgccctgtgttgattgagcaactggttgttatggcccataggccctcccagggtggttgctatgctttgtgcgtcagtaaagcacacccagagccataaagcatagcaccaccagctaacttctgattggttccttgccatgaggcaggcatctgacctctaagtgaccaaggcaaggttatggcaagcacgtgttcggctgttatggctgccgaaaggggagctggtcccttcattcccccattttcttttttggaaattccaatcatggaattgctgtctctctagcgcccccatcagggagtgagagatattggcatccccatgcaagggagtccctcccttgcattttaaccagggaaaatgggcggcgaattctttcccaagctacttcctgctgactttgggaggaagttagggaccccagaaggttgaaatgctagtcaaaagcaaaaaaggaatttaggcaatggggaatccatcaggagcttctggttagcagactctgttgcagagacagggggtgtccacatcagctggactggttcacatccatagcaagtccagggctcgaagtctacttagaacagcctgtagtcagcaactgatactcagatgtctgccagaagcagaaacctgtttaagacatgtttaaactaggaacagaggttaaaacttatttactgaagcccacagtgcagaaaaagcagatatctggatatctgttcaaacagcaggaacatatttataactttgagtcctggcaaagcaaaaactacagatttgggctataagcatgtacatttttcttctgtccagagagccaggtatggattggacagaggtgcctttggcctgatgaaaagccctttaagtttgtacttagatgacaaccaaaataaacttaaaaaccttaaacttgtaactgaacggtagtcattactttatcagctaacatgctgatatcagtaacatgatagtctacagtggatctgactgtctaatgctgccaagttgacaaccattaatatttcagagatctgagaagggtatattttatctgaatctactaaaaagtgacagaagccagtccatatacagttagccatacctaagtttctccattcccgctggaggcaggtgtctcaaagaccagcaatctttgccaggcctataaggtgagagatttttttccctctctgtggaagagggacatggaaaagactgaccttgttttgtctaggcaaagggggtgcaatcaattttccagtgtccagcagctttgtccacagtctcggccaggttctggcaggcggcaggtatcacatctgagcatctcgctcactggtccaggtgcaggaactgggttgcctcataatcttctttgggccactgtcaggatctggcagtctgtctgatattataaactttaaagataacaatttaaatgccatattttgaagatctctgaagcattagaggtctgtttgtctgttttagttacttgccttgagcacacaagaagcatacaggtggctaggtaaggtcttatttctgtaattaattttcagcccgactgtaactggtttcaacttagtaaaatatttgaaacttagcacagctgaatttaagactgcatagagttaccttatagtccttaaacagtagctacatgtacacattttagctgtttgcttaaacttaacttctttctgaggcagggtttttctgtgactttggagcctgtcctggaatttgatctgtgaccaggctggccttgaactcacaaagatccatagagaggcagagagtgtgtgtgtaggtgggagaagagagagcggagcagaagcagagagagagtgaagcaaggaagttggaacttttaaagggaacactgtgcatgcacactgaggttccgtgcatgcccagagtcctcacgcaggctgtaaatgcgtggtgggttacgtggtgatggcacgtccctgtgcgtgccctgattgttgtcagagggcggggtctgtctcttaaggagatattgccgatcagaattaaagcctgaacctttcaccggtcatttccataaagcccatcctaaaactctccaacagcaccgaatggcagaagccacctcttcccttcccgtccttggtctaattagtcttcctgctttaacctcctgagagctgaattgcaggcccttcccacaatccctgttttgtgtgtttttctttttcattgtgtgtgtgtgtgtgtgtgtgtgtgtgtgtgtgtgtgtgtgtacatgaatgcgtgtctatacagtagacatacatgcttccctgcacatgtgtggagccggggggaggactttgggtgtcccttacatcactctccactttgtccccttgagaaaaggtctctactgaacccggagtttgatgtttttttaggtagactggcagacagagagcccagagttcctcttgtctgcacccctacggtaataaatgaacacagtcacacctggctttgtgtgtgggtgctggggatccaaactcgggtcctcttgcctgagcagccagggttcttacccactgaggagatcccagcctgttctgtgtcttcttaaaatttatattgaaagaatttccattgccataaaatccttgagaaccaggcagtttgaaacagtttatcacagttaatgttagttagtcttttcctttgttgaatatttaagtccttgctacatcactcctgaactcaggacaacaaccttgacacactgctctctctacaggtcatgtttagcatgctggaaatctacaatgaacaggtaacattctctctgtgtctatctcgatccctgtctctttctgtctctgtgtgtctgtctgcctctctctctctctctctctctctctctctctctctctctctctctctctctctttctctctccccgtgtgtctgcctctctctgcatgcctgcctgtctctgtatctgtgtgtctgtctgtctctctccttctcgctctctttctgctgagaatcaaacccaggtcccagcacaccctaaacccaggcgccatcactgagccccagccatcccgagagcctgtgctaacaacatacatgcctgagcggctccatgggttactagcaccaagggctctggtcactggtcactctgtgttaaatgtagctcacctgcctctccagcaccatctcaaaccctttgttcttcactgtaaagaacctcagagtcggctcaagataccccaagaccaagttctcagcacaaggaaatttatttgccccagagtgacaaagggcagagaacaagagacaaagacaagaaatagaggatgagggagaaggggaagggaacaagggagaggggaaaggagtatttgttctggagggcaaaggactgactgcctctggatagagaggagccggacgtgttccacaggcaaatggcagtttataaaggtacgaggggaaaccccgcgttaggatgaggagtttcattttcattgggcatgttaattagggcagccaacgggggcttttgattgttggactttaatactttgatactgaccttggtagtcaggagaaggatgtggacaaataagggactagacctcggtggctggctttaggaatgtgatctaatggtttgtggcaaggcagaggggctggggagaagggaaggcctgcatgagccatccacacccggccccggctggctagagtcccctcattcacactcacactctatgctctaaccacacagcagctgtcttagtcacttttcctttgctgtgataaaatgccacagcaaggcaatttatagaaggaaaggtttatttggagattacagtgataaggaaggaaataaactgtataccaattcttctctttcctcctacagataagagatttgctgtccagaaccaagactccgggagggttaaaagtcagggaagaccaacagctgggtttttttgtggaaggtctgaagtgggtgccttgtgagaattacacacaaattgaaaagctgatggagcaggggtccaaaatcagaatgacagcttcgaccaacatgaatgccagcagtagccggtcccacatggtcatcaccatccagctgaagcaggtagggtcctcatctgtgggacaggatcccagtgacagagttggggtggtgccaaagaatctgttcaaagtgggccagtgggctaaggtaactgcttccagccacagagggtcccggacgggaagagcggagggccttgctccccctgcccatccccaaccaagcagctccttccttatggcagaatcgtcttactgtcaacccattctcggagtgcccacaggacatggctggctgttttcctcaactaaattctacactctgaggaatgaatttgaggccaaattaataaaggagtccttggtgaaaacagtgactgtggtctagcatggaaaattaagactagcaggcccatggttaccatctgagaggctcagccatgagccaagggcacatccaggtgctcatacacctttctgagatgaagcctgagcagtcctgggaatcttgtagcgtccactaactgcagcctttgataaaccagagaggacgtctctgagcagcatccccagtttgttctagaaacagttgctccggagccctgggtgaatgccatagccagctctgattacacaacccccgtcttctcagtgtggaatccgtaatggtgggaacccaacatgttcacaccagaaacagcggacacagaagtgactctcaggtaccagtgctaagactttgaggagatgaactttttattgacacatcttcccacagtgtaaacaaatatcccacaccagagagttttgtacactgtaagggctgttccctggatgaattttaccgtgttagtcaaattcatatactgtatatgtggttcaccctgctatttgaacttcttatctaggagcaagaggggaaattggatgaaggtaaataaatggaaactcttgttttaattatttatttttattttatgtgcattggtgttttgccatgggtgttgggtcccttggagctgaaattacagacagttgtgagctgccatgtcagtgctgggaatcaaacccaggtcctctggaagagcagtcagcactcttaaccactaagccattgctccagccccctctttttttttaagtgagaaaattaaaatgttaaaaaaagaagttcagtaaaccttgtggtttcacagcatttgatgtgctaaaagtttactgaaatgcctgtaatgactgctatctatcgtccctcaaaagagctttgcagaactagagagaggcaagcaggacacttgagcccagggacatggtattgtcactgtcaactgtcactgcacagagacggctgtcatcactgctttaatatatttggagtcggtgatttaccttgaagagccatggaagctcatgagacagtctgtcaatgaggcattaatctaacagcctgaggtgtgtctgtctctacaggttttcctggacatggccctcaccaaacaatccagtatcaacatggtggacttggcaggaagtgagaggcagaagtcatcagggtctgaaggggaccggctgagggaaggatccagggtcaatttaagcctaaccagtttaggaaatgtcatcaggtatgtgaccagcacacagatatccatgcgtcttagttacttttctggagcacagttcctccagacccccatggctaactagagggggtcttgccctctgatcttcagggaagctttatttgttagagtataagcaagatattactacacttttctatttctctgaagagacaccatgaccaagggaacttatagaagaaatagtttttgggggctcacagtttcggagggtcacagtccacgctcttcacagtggggaacatggtcgcaggcaggcagacatggcattggaccagtagctgagagctcacatcttgatccagaagcagggggcgcaaagagctgactggaatgctgtgggcttttgagacctcaaagcccacccccagtgacacggcctccagcatggccacacctccgcatcctttccatagagttccaccaactgaggatcaagaattcaaacatctgagcctgagggggcctatatcaggctttcttgggccaccatacctcaaatcatgacacagagacttcttattaattatgaaaactcagcctttagcttatgcttgtctcactagctctaacttaatttaccccatttctattcatctaagttttgcctcgaagctttgtacctttctttcattctgtatgtcctacttttccttcgagtatgggtaggtgctcgtcagtgcaggagcccggggaggccagaagagggcgtcagatcccctggagctggagttacaggtgactgtgaacagccgactgtgaacagcctactgtgggtgtgaaagtcaaactctgttctctgcttgagtggtacatgctcttaagctcagtgccatctctccagtccctgtcctttgtgtaactgagcttaggtctctagcttgtgtcctgtcttgcttgggcacctttgcacaggtgtctgtgtttattattgtcactttaccgagtggatagtcacttctctgacctgaagccacttcaaggaggaaggatttatcttggctcatggtttgagtgaggaaagcatgcggcttcttggaggcagaaataaacagtggcttacccacaaagttgaccttcaaaccccaacacatggccaccgcagggatgtgtgagccatctctagttacccctggagaggcagtttctttcttatcccctccattgttttatgttttctccatacacagtgctctggctgactcagccctggggaagaaagtcctgcacatcccctacagagattctgttctcaccaaactgctccagtcgtcactgggcgggaacagccggaccacactggtaagatagacctctttgtagaacaggtaacactggctcagctttagagttctgtggctgaaatcaccctcaacacaccaggactcagcgctcaccctctgcatcatctctcagtcctgatgcctgtccgctgcagtgtgtaacaaggcttccacgacattaaaaattttactctttgctgcagctttcgggttgctcctggaatatatattgctttccatttgagctctgttttgtgatgagatggaaaccaggacctggcacacaccagacaagccctctaccaccaagccttgccaccagcctggaatattatatataattacttttttattgtttttgcttttcaagacagggtttctctgtgtagcctatcctggcacttgctctggagtccaggctggccttgaactcacagagatctgcctgcctctgcctcccgaatgttgggattaaaggtgtgtgccatactgcctgacttgtatataattacttttgctataagaacagaattaacaataatactaccacattctatgataaggcagttagttgccaggcagatgtgcaatcttcagggtgactgagtttcactgactcagctatgtgggtgcagggcctatgctaagccagggccctccctctccaattgcagaatgggacaaaacaggctaaatgccacctctctccaaactcacagtaaaacacagccttacctaaacacttgcctaagtacttcactttaaagtctttctgggtatcggttatttgtggatctcagtcatgcattcaccaagcccttggactagaacaacactcctctgagctggagacacagcttggggtacagcactaccatgttttagattctgggttccattcctggcactggaaaaacagaagcaaaaccacccaagacaccttctgagtgtccaactgcagattgaaatccagcaatctctcaggagtatagtcacctcagacagtgagtatagtcacctgagacagtgagtatggtcacctgagacagtgaggcgaggacaccttgcagatctgcaaaattcatgggttttgagacatggtctcactatatagcttaggctggcctcaaaatcacagtcctgcctcagcctctcaagtgctggaaatacagaagggtactagtctaggaatttattctaggcagcccctagcccctgttgtagtggggtttttaggtttttttttttttacacagacagggtttctctgtgtaacaatcttggatgtcctggaactcattttgtagaccaggttggcctcgaactcacttgagatctgcctgcctctgcctcccaaatctgggattattggagaaaaggaggtaggagatgaatatcgagtgttccaagactcaaataaaacacagaatggccacagcccacctcctccaagctctgtgccacctgtcccgatttcagcaaaaatctctctttttttggtatgagtgttctgccttgcatgtacacctgcaggccagcagagggcaccagatcccattatagatggttgtgagccaccatggttgctgggaattgaacccaggtactctgaaagagcaggcagtgctcttaactgctgacccatcgctccagccctcttttaaaaaaattttaattcaatttatttatttattttccatcctgacaagttttccctccctcttctcctcccacttcccctcctctgttccctcccccatccactcctccttccctttctgttcagaaaaaaacagtaggcttcccatggatatcaacaaaacattctcttaaaagggattagtcactggctccaactgacccggacagcaggcagtactccagacatcattgttaatcagccaatatccataaccgctttcaaactttagggtagatgttaggaagctgccttcagattctgtatttgcctctttcagcgaatgatatgcgtgcattgttctgagtcaggagcataaagagtccacaacctgagttcacagccacgctaagttatcttaggttgtaaatgttggttacacgggaaatccaaggctaataaggttggttgttgcactgttcccttgaaggaaggttaaacaaacgggccgagcacacagcaggacagcagtcttaagtcttaatgacctcaaggtgtgttactaactctggctgcaaggcgcagctgaagttcattctcttagaatgtgagagaggcttcccaacattgtttaccacagctgggggtttactgaagcttacctcagcccgagtctgtgagagtgtttccacagagggttccacaaagaagaagcacctgccctgatgtgggcggtagcattcctgcagctgcaggctggggtgggtaagagggagaaagaggaaagaagccgctctttttcgtggcgcctcctaggctgtgggctgtgtcaagatgaagctgagtatctccttcccggccaccggctgccagaaactcatcgaagtgggcgatgagcgcaagcttcgtacgttctgtgaaaagcgcgtgcccacagaagtagctgcgatgctctgggtgaagagtggaagggtcatgtggtcccaatcaggggcgggaatgacaaacaaggttttcccatgaagcaaggcgttttgacccgcggcagcggcagagtgcgcctgctgttgagtaaggggcgttcttgctatagaccaaggagaactggagagaggaagcgcaagtctgttcgaggatgcatcgtggatgccaatctgagtgttctcaacttggttattgtaaaaaaaggagagaaggacattcctgggctgacagatactactgttcctcgtcgtttgggacctaaaagagctagcagaattcgaaagctttttaatctctctaaagaagatgatgtccgccaataagttgtgagaaagtcttaagcaaaagagggtaagaagcccaggaccaaagcacccaagatccagcgactggttacaccacggtgttctacaacacaaacgtcgtcgtttgctctgaagaaacaacgaacaaagaaaaacaaggaggaggcagcagaatatgctaaacttttggccaagagaatgaaggaagccaaagaaaagcgccaggaacagatcgccaagagacgtaggctgtcttcgctgagagcttctacttctgagtctgagtccagtcaaaaataagtctttaaggatgacaaataaataatcacacattgaaaaaaaaaaaagaggaaagaagcccacagtacaggctttctctcaggcccacaatcacttcctgccgggatgtctgagcccagaaatatccttcttgtggttggttttgtcgggcgctttcgctcacacaggattagtcgctatgctcttgacaggacctggaatgagcaaaacttttttctctgtaccctgagaacattcagcaatcgctcagtctcctgaggacactgctgaggatcaagcacacagagcctggggcagtcatcaggacagcgacagatttcagagttagccaatggccagctcaaattccagttctggccggttatcgtctgggtgaccttgactttattactattctctaagcagagttttctggcttctaaactttaaatagagtagaaatggctcagcagggaaaggtacttgctgagttctattcccagaaccgacagagtagaaggagagaaaaccaatgcttgcaagttgtcctctgactgccacatatacacacactgtggtgcttgagcatgtgtatacacacacacacacacacacacacgcacgcacgcacgcacgcacgcacgcacgcacacacgcacacacacacacgcacacacaaatgtaaaaataaatttattttttgaaaatttaaagttcagaagcatggagggttggctaagaggtaaagaacacttgttgctctttcagagaacccaggtttgattcccagctcccacctggtggcgcacaaacacttgtaactccagtcccagggaatctgatgcctacttgtgacacacacatggtacacatgcatacacgcgcaggcaaaacatccatacacatcaaataattaaataaatctaaaaacgtaaacgaggggcctggagagacggctcagaggttaggagcactgtctgctcttccagaggatccgggttcaatcccagcacctacatggcagctcacaatcatctgtaactccaattctagggcatccgataccctcacatagacatacatgtaggtaaaacaccaatgcacataaaataagtcattaaaaaataaatcatttgaagttcaaatagtactgaaaactaaatgatacacaagctgttttgtaaacattattattattattattgatttttcgagacagggtttctctgtggcttttgaggctgtcctggcactcgctctagagaccaggctggcctcgaactcacagagatccgcctcccgagtgctgggattaaaggcgtgagccaccaactcccggctataaactttattcttattagcctatgcatgaggtgcatgtatgtgtatagtcggagcgcaaatatgtctctgtgtgtgtgtgtgtgtgtgtgtctgtgtgtgtgtgagtgtgtgtgtgtctgtgtctgtgtgtgtgtgtgtctgtgtgtgtgtgagtgtgtgtgtctgtgtgagtgtatgtgtgtgtgagtgtgtctgtgtgtgtgtgtgtctgtgtgtgtgtgtgtgtgtgtgtctgtgtgtgtgtgtgtgtgtgtgtgtgtgtgtgtctgtgtgtgtgtgtgtgtgtgtgtgtctgtgtgtgtgtctgtgtgtgtgtgtgtgtgtgtctgtgtgtgtgtgtgtgtctgtgtgtgtgtgtgtgtgtgtctgtgtgtgtgtgtgtgtgtgtgtgtgtaggccagacacaccacaacattgagtgtcatcctcaggaatgccacctgcttcctttgagaccgggtctctcattggcctggagctcacaaattagactagatcactagctgatgagccccatggatcctcctgtctcagcctcccagtgctgggattacaagtgggtgccagcatgcatggcatttttgtcggctatggtatcaaactcagttcttcttgcttgcaaagcaagtgctcgattgtcagtgtcatccccccaacccgaatagcagctattttaatagcttccatggtaatacacccttggatgacaacagtctgcacgggatgattccagattgcagccataagcccagccgatacctgttatgaggaaaccctgtcgacactgagatacgctgagaggtaagtggtttgtgagctgcaaccagtcacgtgtcctgtgtcctgagtcacaactcctttcagcactctgctggtagattgcttcgtgtttggggtgggagtccaggagaaggagagttaagtgactagtgagaggggaatggaaagacaaaacaaatgggagtaggaagggctggagagaaagctcagcagcaagacgttctctgtgcctgctcgctggctctctcaggaatgctcggaagctactctgggccttagtgtggtggggccgccttcactcccggcgcagcacctgggaggcacatgcaggtggacccctgtaagatcaagagctgcagccaggtgagagcctgtgtcaagaaaactgtgcctccagcgaacagcctctcctgacctgccctccagactcttctcagccagggagccctttcctgtgagtgaatcctgtccccccccatttctcagtactcagacactgctgcctgccatagcactctctcccggctctgctgtggaagctcacgtctgcgggtaggacttgacttcagccgtgtctggaatgttccttttctcctgcctatccgtgccatcctgctgacagtggatctctgggcaggatgcacaaagcggcactgcgtttcctacactctgtttccgactttgtgcttggagcgaggctcaatggaatctttaaatttctcttgtgaaatgaaagggtaaagcataaaacacctgtgggtaaagccctagcatttaatcccagacgccaaggtaaaaatagcataggatacccgttaaatttgaatttcagacagagaataagtcatgttacaatatgcctgagctttctgtggggataggaccaggcacagaaacctctgagttgacggtagcctgctgttgtagaatattattttaatttgtgttacatttgtttatgctgtggaacatttgtacaatgatacaaacatgtgttgcattcttttttaaagatttatttattatgtattcaacattctgccctcatatattcctgcaggccagaagagggcaccagatctcattacagatggctgtcagccaccatgtgggtgctgggaattgaactcaggacctctggaagagcagccagtgcacttaaccatctctctagccccgtattgcattcttttatgttgcatttgtttaactctgggaagctgtgttaagctgtccaaaatacctgattgatctaataaagagctgaacggccaatagcaaggcaagagaaagggtaggcagggctggcaggcagagagaataaataggagaaatctgggacgagaagatcaaagagcaagaaaaggagaagaagccatcaggcagccatagagaaagaagtaaagaaaggtatacagaaatagagacaggtaaaagcccagaggcaaaagataaatgggataattaagttaagaaaagcgggcaagaaacaagacaaactaaagctggtgttcctgagtaagaagcctctgtgtatttacttgggagctgggcagcagccttttccagggttttgattgttgatgaaccacattctttgtttagccaagtgtggtcaggacccaggacattcagagacctagcatgggactcagctgagctttgggagtttgtatgaaccatgtaggttacttagatcagttttgttcctaatggctgcagacatgtctagcctgtggcccatgggcctacaacacatcctatactagctatgaatgtggcccaagaaacctgaagatgacacagggaaaaaggttggaccctcctggtagtgaaaaccaacatggttctgcctgggatctgagcttgtcccttgctaccccagggctggtggtacaggcctgactgcaaaggggcccgagacagtgtttgtcattgcatgacagggctaaaaaggttcagaacagagctacaatcaacacctgcacactggtgagagcggccagggccgagaacaagctgctgctcggattcgggggcaccggagaggcaggtaaatcaagttagcaggctatgctcagccacacctgacacccagaggccaattggaaggactgagggtggtctgctcagcagctgggcgggggagggagggcacacactctgttaaggatcttctggttcaaccttgaaacattccagctttgacatcagtgtggtctttttttttttttttttttttagacagggtttctctgtgtagctttggagcctattctggcactcgctctggagaccagagtttaaggctggccttaaactcacagagatctgcctgcttcttcctcccgagagctgggattaaaggtgtgcgccaccaatgcctggcccagtgtggtctcatttaccattgacatgaaacaacagccttgtgctttcccacactgctcacacacagggcaggcacacctacgaggatacatgtccaggctttgtatgctggcctgctgaagtcaggcatccactgtaacaaagccgctgcctcagttagaacagacacataaggtggttcacacctggctctactggtcacgtggttctgggtgtccacacacatgaagcatctaattcccactatttataaacccagacatgaaacatgaaaaaaacaaaaaaatgacaaatctgtcattctctctgaacctctggtcggatgggaattccctgaagaaatggtcacatgcctgcacacatgaaaaggagaaaggggacctgtgagctccatgcttcccagcaaaccatcctttgtgttttgttgcctgagttaccccagggtactacttggagcaaatgagcccatgagtcttcacacagaagcagctcgttccccactgctgttcaccctacatctcacttttgatgccacataaaggccctccttccctctagagcactcagcttgtttcctggcagaatggcagctggggactagggggacctgggcccacctgctggctgaggcacagaaggagtgggaggaacagtatgcagctctttcgaaggtgaggctcatgctgtccacgcttccctccacacagctgacagcatgttctgcagtcaggctccagactgtggtgaggacagagttagggcctgaagggatcaagatcatgtcatactgatgagtgaagacagatgttggggctgttggtgtgtgcgtgtccgtcctctggggacagtatagattggcctgagctattgcatccctcctggctagcattcactttactggcagatcctaacaggccatgttgtgagctcaaaaatcattattattttgggtgctgggtgaaattcagggcttttcgaatactaggcaggcctctgtgcagcactgagtcacaccccagcttctgagccaggccttgaatgtcatccatgggtgaggaggacgcattccctccctgcctcacccgagtcttggaccagacctggaactcctgggagagaggggagaacccaacttgaattcaggaaggctcatgaagctcggaatgaattccaggtggtggaagtagagaagggtgtggtctgtggtgtcaacagccagatcaagttagaggtcaaggattatgaagattatgatatctaggcaaaacttggtgccaataaagtcccattaaacagcatcctgtgggggaggggcgggggaggctgtgtgactctgggtctaagtgggattcaggatacaggtctacaaaactatcgcagggaacaaccatcgccaggactttcatattctctactcttaatcagaaggaactccaggatttaaaaatcgccctaagccaaggtgtttgctcgagttctgtttgtctatcctccatgagcacaatagggtcctaccctgtgcggaagacgggaacgcacttgggcatcactgggggagaaggcagtgtgccattacttagtcagctagcagcaagttaagagacccaggcaggaggccatgggggtgaggagggagtggggagcagggggctggaggatgccaggggcctgaagaaaacctgtgaggcagaatgaaggggggaggggcaatagaagatggctggggagaagaaaggaggggaggccccgggccttggaaaggcctgcccggacagctcccctcctcaggtccctggggcaggctcgggcatttacaggcttcttctgtcttttcaggagcagcagatggtgaaggttgtcccataccttctcaatgtcaatgaggacccgcagctcacaggggtcctcaagtatttcattcacaatggtactggatcctgctgcttcccttaccgacccccaggccagctccaattccctttccttcctccctctcttcctccctctcttcctccctctcttcctccctctcttcctccctctcttcctccccttctccctctccccttccactccccctcccttcctccttccctcttcctttcttttttgtgatattttaaattttgcattaaaaccctataacatgaagctcccctcttcaaccactgttgagcacagtgcagattctctaaaccatcaccacatctatttccagaactctccacctgccctcaaactgaaactctgtacccattacaagccacctccccactcccctcccggagcctggggcgacgccattctcctttttgtatctggatttctgcatgcctcatagcctcatagcaccaggctcacactacccttgtctttgtctgtctcatttcactgagtatcattagctcattcaaggtgtagcatggtttggcatttctttccttgctaaagtaaatggtccctatcagatacctatgctgcatggtttttatccattacccacgtgtgaccacatcacatttgcctagtggcaagccatgtgcaggatggtggcaggaggacagccaggagctcgggatacagtgctcccgaggggccagccaccagaaacagagcttctaagagcctttgctgccagcagcagtgggtcacggagaactaaggcccatgaagaaagtggcattttcaccaagttggggattccaagacaaggagagcagaaagtaaaacaattatccataaagcaagctcatgcccaggtgatgttatgattggcagctccaattggaaaaaaacgaaacaaagcctcttagcatactcttaccttcaaggaaaaaaaatgccactttcaaattatcaaacacattacttcatcaaggtcaaatgctgacgatttgaagataaactttcccaactctttccaggctcctgtgacgttggtcgagctgctacaaatactatctgtcttcaaggcctggggtaagaacagcactggtcccagaccagagatctgtcttgttatgttatagatgttttgagacaggatctcactgtgtagtccaggttggcctcaaacacggaatccctctgccgcctcctctaagtactgggctgtcaggttttcctcttgccaccttctctgagtacgagactgtcaggcttgtatgtaacatgcttcactggagaagattctggaaggtcatccggtaagtcataggtaagccaagctgttaagtcctgctggaagggcaataaaagttcccagttctccctcagcaactcctcctatgctcatgaagagtgcctgctgaagtccagtgtgtggtgcacgcctcctgtttccttctgctcatcttgggagaaaaggctaaagcctgtaagacagaaatcccacaagcagaagaaaggagaccttgcaaaaaactaggggagacaaaaggccaagcacattgtggaatgtctttcatgactgtaccttcaggtggctgtatcctcagctgtttgaagccctgactgaagcagcttttctaattaattttaaaactacatgtgtatgttttaattggcaccatagttagatgtatttgttctctgtaatgtgattttcagaccacacatgcaatggtagtgatcagatggtctagggactttgaaacattcaactaatgacttagagcaccctaagcttatactgtagaacaccagatgctctcttcctgtcaagctccaccctgtggccattagcaattccctgcccccacttcactctctacctccccaccccggctatggtaaccactctgttctttatctctttgatgccagtgttctgacctcctcgtgtgggtgagaacatgtgattatctgtcctctgtaccttttggctttcacaatgccctccagttgcatccatgttgctgacatcatgggaatcctttcttcctttctggcccaatagtttccccctggtgtacatacagtgcatctctttactaccttttggtggacatgggtttattctatatcttggctactgaaacctgttttcatttctccattgctagcgcgtagctttcaaggacttgcaatgggctcagtagctgttggttcctggcagctgtggatcctcagctagtgtttgttctgtgaatagaatagtattttccttgtcttccaacagcccatgaaccatagcactgtggggtgagggacagtgggagattcctactgatcacactgtgcaactgggccagccatgaaatcataacctaccggatgacccagacaaactctcgtatgcttagaatttcagataaacatgcttccttcatgaatttggatggtaaagtgacaatcacgccacacagcaagagcaaggtggttgttaatgggatacctgtcaccaacaggacaaagctgcagcatttggtatgttgcttgcccagccacaacgtacctcagtgctaccctcaagatggtggcagaggtgggaggggggctgggacatgactctcttgtgaaatgtctcctgtcacactgagagggactggccaggcctggggcttcctacatctgccagcctgcataggctgagtgacagacctccttccaactcactgtgtcttgggaacacaaggagggtggaaatggatattttcaagacccttctcagtgctcacattgatgatatctgaggcttaaaagagcctgctggggagtgatgagttacttgcttatatcattgcctttgttccgatttgctctgccaccctccttgtagtctccatcaccgcagtgggtgtactggctgccacgaagccttctcccttcaccagtcactatatacagaaggtgcaagggtctaagacgggcaggtagttcagccacaacccttttagaagcactgggtgagccctcctagcttcactgtccagcacatgccccatcccaaggacttctctttagtggaccagcagcagtgtggtctacctcaccaaaaagcccccacataacgtctgcattgaaatcttctgccctctcaggggtcttctgtagtcctagtctgagtcggacccagtgcactccagacctatgctttcttctgaggctctgatctcgtcccggaagagggctaagtctgggtctccccagagcaggccaggcctttcctcccaagctctccccaccccaggaccgcatcatcttgggatccaacagtgccttcctctacatcgggtttccctcagagcgaggtggtgaagatttgagcagattcgactatgactttttccagctggaacgggcagctgctgagggcgtgagtgtggacatgcttggtaagggtcctggagccgcctttgggcacctccctgtgaattcatggagatggagtcagagtacagtatgtaggaagttggaatgtgagcccgccactccctctctctcttcctttctcccttctcctctccatccccctctgtgcatgctggcaatgaaacccaaggctctgtgttcttgtgtgctagacaggtactccactgagccccatcctcagccccaaaattggtcttcatagaaacagaaaactgaatacctgtcaaagatgtgttggactcactaagccttccctagggatgagggtgaagcttggtatgggcgagtgttacatgcagcaagaatgctgagatgagatgagtgggttagatgcaggccttgaggcaatgcagggctgaacagcgtgcgcgctgtgcctgctctgggctggagagatggtgaggggcaaggttcaggccttgctctggaagaagttgcagctttagatttctgagtagaagatactcctttgcccctccacctacccgccacccctgcactatctaggattcctcactgggtcctagagctccaccctgtgcctgtccacctcaggtggggactgtccacctcaggtggggactcctaatgccttcccacatcccctcccccggcctcaagtcacaggcacagggttgactggacccccctgaggtctttgtgacatggcggtttctggggatggcatctacactgtttgccttaataaagccacgggtgagggatagtgaggtgtgggaattacaggtatgagcacccatacctagctctcactaggtacccaaggctaactcgaaacgcattatgtagcccaagctgattcaacttgttaacgtgcctcagcctgcggggggattgggattacagatgtatgttaccacatccacactctgctgaagttctccatataaatccaaggccagggttagcaagacggctcagtggctgagaatgctaccttcctagctatgaggtcatgcatttatactgtcatccatgtaaagagctgggtgtagtctgatgcgggacagagacaagaggggtgcccatgtggcttggtggcttcttgtctaggttcatggagaaatgaccatgtctcagggaaataaggtagaaagtgatgcaggatgcttgacacccttctttgctctctgcatgcacacctgtacacacacatgcatgcacacctgtacacacatacatgcatgcacacctgtacacacacacatgcatgcacacccaatcacaagcaagactacccacaaataacccaccttttcattgagttcttcataactgtatagaatgccttcccagaatggggacggtggtgacaaggaagttcatcaaacctcaggccctgggttgaagcatttgatggagggctctcaaggcgccaagtgggaagttgtgaggcattgatgccatgtgacccatggtcagggagtctctaaagagaagacaggtcctaacacgaggcagtactcctccaagtctgggaagggtatcagggcctcccatagtcacatgacccttcctccatagcacccagacactactggagtaagaacagagtactcgttgggctaccaaggattgagcccctctgccttctacttactttaaccctccttcctggatagtccagaactccactggactgagggccttgaaatcaaagacaaggatggctaggatttcatggctaggtagtaatgaacaactataacagctgagtgtgtgctttgtgacagctgaaacgtatcctacaacaagcaacaaagacttgctttctccatgactcttgctagataccatgagtcccggagatggccgagctgaccccagcgtcttggctgtgttccaggactacatcaaactcatgccgatggtggtggaagcaaatcagatgagtgaggagctagagaaggtgacctttcaccccgatgatggcacaacatcaggtcccaaaaggcttagggaagggtgaagcttttccgagatggcactcagagctagtgacagaaaaagactaaccctcaggccttctcagccagctgagcacctgccctacttatcaaagccaccagcattccagagcaacatttactgcggacgcctccaatatccccagtgcctctctagcacctcaatggctgattcaccacagaggggacctggtgacatgtgacacctgtcacaagaactttgggagggaattaaccaaccgggaagcaagatgttagttccagggtaccattgggaattttgtttcgttttgtttttgtttttcgcaacagggtttctctgtggctttggagcctatcctggcactcgctctggagaccaggctggcctcgaactctcagagatccgcctgcttctgcctcccgagtgctgggattaaaggcatgtgccaccaccacccggccaccactgggaaatgttgatgctctgctgtttggtaggcaggaactccaagagccaggccatgttctttagcaaacccagggctgagaagaatgcggaagaggctgaaaaggaatatgaatgggggttgtttagtgagatgtctcttgaccagggcctgaaaatggaattgaaggtgaagaatttagcgtcgtcagattccaggggctacgacctccagaaagaggtcatggtgaaggtgaccaaaccaaggactcacgaggtaggaccccatcagtggggaggcatgcatctcctcaggaggcttccaaagtacacaggggattttttgtcagctgcatcctggagacttagacaaaaccccagatgttctttgagtaggaactgagtctggggaccctttgccatgtgtcctagttcttctctcatagtgccagttcctaggatcttttctagtgacattgtacttagttggggttactactgctgtgatgaaacaccataaccaaaggcaacttggggagaaaagggttaattccactcacactcccatgtaacagtcactgaaagaagtgagggcaggaactcaagcagggcaggaacctggaggccatggaggagtgctgcttgctggcttgctcctcagtctgcttccttgtagaacccaggaccaccagcccatggtggtctgaaccatgtgctcagtcctcctgtatcaattaagaaattaagaaatgctctacagatctgcctacagcccgcttctttttctttcttccttccttcctttctttctttctttctttttttttttttgaagcagggtttatctgtacatctctgcctatagaccaggctggcctctaactcagagacccaaggtggtggtgcacacctttaatcccagtactcaggaggcagaggcaagtgggtctcagaggctagcctggtgtacatagtgagttccagaacagtcaggaatatacagagagagagagaccttgtctgggaagataaaaaaggcccggaaatttaccagatggtaaagatgaccgtgtccctctgtgtgcatgagacagaaacatactctctgtatggtgcttcctggaggccagagagacagaaaaatctgtttttatcatgcaactgtcccaatgagggggacattcatggagacaaggccttatccattggcttttgtttttattctagttgcccagagaagggcttgttggttttacctcatactacttctgatgggacattttcagtaaagaaaatttccaactggatttccgtatattgcagcgtgagtttctcttcatagcaggtatccacagaggccttatgcttgcccagtgagaggacaggaactcctgtcctagacttgttgctcactggtgaactcctgaacaagaatggaacccctttgtgggcgtctgagagaaggaactaaagtacctgtgtgcttagctacaaggaaggcagaaggggttgttccccaccccccagcacagggctgtacatctgccattgagccacttggcttttctgtaaaccagttgttctgtacttatatcatctagtgtctacaacaaactgtcactcactaatggctcaaggttataaccttctatctctgtgggctgacagtccaatgcaggtcttactgagtcatgttattctggggaaaacctgtggttaaatctatttccttgctttttccaacttctagataccaccaatacaccttggctcatggcctctctatctttaatgagccatacattatctctctggctccatttccatcacattaaatatggtattctggaagggcctcaaaaagctgcttgatgagagcagtatgtggtcttcccaaaactccacacattaggagcagcagattggaaaaaagagagatgggttgtttaagcagcaaatgaaacaatgtgtggcctggtgacttgaataataatggaacccatagacttttacatttgaatgtttagattccaggaggtaggtcactagaagttcatggaaggcccagtctgtctctgtctgtatccagatcaggatgtaaagcgtccagctactggtccagggccaggcctacctacctgccaccatcctagcttctgtgacgatcatggactaaccctctaaaactcaagcccccagatgagtatgtttttttacaagttgccttgattgtagtgtctcttcacagaaataggaaagtaattaagacactgggtgacccttctgcattccctggtatggatttggacaaaagccaagtttatagaaaagtaactaagatgctgggtgaccccctttgcatccctaggtatggatttggtcaaaagccaagtttatcaataggaaattcctgatggaggaactttaccagcgcttcctagagagtgacgacagccaggtggctcaggaagacgaccctttctgggaccctgtagaggttgtccacttgggctcagcacacgtctggctgcagtcgctggctcactgcatggtgctggaggagcaggtggagtttctcaactgtgatggactggccgaggcggtgctgcacatcagaatcaccccctgctcccccgagggatggtgagtctcgcttcctctcagaaagtccggaaagagccagagttctcatgaaggggcgggaagtcaacttggtcccttaaggggttactgatgagacaagtggatagctcatttatgacttggccttattgaattggattcttgctgaatgttcagcatcagagacagctcagcactgctctggggaaccaagggatgaggaggacatcacacaaagcaaaggtggagtgaggaacactgaacccaaagccatggcttggtttccatgaggggacactgggaaagaagcctacgttatggacatgcttacccatagcctgcttctgggatgttggaagtctggcatccactccacaggatgcttggcacacttggcaggcatcagagccagaaacagaaagttggtttttgatgtcccatctccattcttggcagaggccagaactttgctccttggcttgaggggagtgttaggggtctggactctgtctgtgctacccctgaactcctgttttattatttatttatttatttatttatttatttatttatttattttggttttttgagacagggtttctctgtgtagctttggagcctatcctggtactcgctctggagaccaggctggcctcaaactcacataaatccgcctgcctctgcctcccaagtgctgggattaaaggcatgcgccaccaacgcctggctatttatttttgttttatgtcatagaatgtttatataaaaaagtattttagcaatcctaagcacagagatggcaggagtcctgggctgggtacaaacatccagtgtgacttgaggaaatccacttgagaagggagtaggagagcctcagggtcctgggtccaaaaggctaagctgaccaagacctcagtgtctacacggacttcaggtcatgggctagtctcctgtctacactagctacctcagctgcccagtggtcacttgaaaatgaacaacatgacattcttctgtgtaagttttagactttctgagcatggttgacagaagagaggtcctcagttagaaagctgtcccaatcggtttctgaggatagaaggttgatgtggactctggactagggatcacttaccaaggtagatgacaaattaggctgcagtatgggagcaggccgctggcctttcctcctccccagtgggaccaacctcagtcttcagtgtgggtttagccccatctccaaacatattcgttgcatgatgtttggactcttctctgggctgtgagctgttggagacgatatcttttccagacactaccacccaacccttcttcagggcagtcgtctgtctctgtctcttaaggactctttcactgctgacacatttgagtgctaactagcctgggttcagcctaatccagagactgatgttcaactcttgcctgtagggcgcgaggtgaggaagacatggtcattgaccctctggagcttctgggcaagaggattgacttccagattcacattgttgggtgccttggtgtcaagtggctaaaggaagatgcaacccggggcattcagatggggtacatcacctgcacacaccacctgtgtggctcctggtgggaggagccttatttcttttcagtttttctgtttgcgcaactgcagaacagctgctttcttcatcaggtagagaagccacatggctctccacattactagtgagctcctgagtctcttccgtgagtcaagcagcagggtcagacattttaattgtcacagagaaaaatccaccaagctatgttgtttaagtaaaatgcattataatggtacagacacaaccaggaagggttaaattcattaggttcaaaggatattgaaaggtaaagaaaaggttccttaagtgaaaaatgccaggagttggtggtacatgctcttaatcccagcacttgggaggcagaggcaggcggatctctgagttcgaggccagcctggtctaaagagtgagtttctggacagcaagggctatagagagaacccctgtctcaaacaagtaaaagtaaaaaactgaacactgttacgataaatctttccgccaaaagccgccagagctctaccaccatgtggtcagtctctgccagccgtccgagttctgcctgctgagttagagccccaaataatacacagagacttctattagctacaaatgctgcttggccaatgactaggatttctcatctgttagctcaatcttaattatcataaatctatatattttataagacttattggacgccttccgctggcaccctctcttgccggtggatcacatggtgactctggaggaagagagaagggccacttccttcttcccttgtttatgtatgagtctccctgctatgccacttcctgcctggatcaccacttcttcactacatttcccggaatcctctttgactcctagtcccacctaacttgctgcctcattggccaaacagtattttattcaacaatcaataagatgaacatacacagaagtacatcccatcagaacacctcccaaggatacttggcacggtagagcatccacatcaaatctaaacattgattaaacccttcctccctgttggacttaccagctctatggaaatgatactcatgctgagtaacagggttggaggcagaaaccacaagactgcacacagggcagcttctcatctagctggctcatctgactgttttcttcacagataggccccttctggtattcaattatgttttatattcttgcctcaggtacaaaatttatgatctcccaaatgctgtgtacaccaagcccgtgtggaaaagtgtgaacccccaaactgaagagactctccatgttgtagccttgagtgcatctcgagagtttctggattacttactgacaaatgcccttattgttgatttgtggggcctccaaggtacctttttactcattctttcctgcagtgtgctgttcaaccagatcgatgctgggggaggggtgtctgtggagcagtgggtgccatcttagatgttcacctcagctcactggggtctcggcagctcagactctttctagtttatctcccacactgcagaaggctgtgccgagctaggcttctctcagctggacagcctgctcccaggcgagggccacatcatggtagataccaagaaattttccagtgtgaagactgcgaaccaggtgtgtacacatgtcagatcacaaggggctgaacaagcttggtgatagcctctgaagagtcatcccttcaatgaaagtgggttttgtgcctttgtgtgtactgagggattggaacctctccctgcctctccatcccatccttgtttatgaagcactagcctggaaggctatgcaggtaactccacagaagctgagctgacctatcttctgtaggtcatgtcaaaccaggtgccagaaatttatcagaagctgctgaagttagagcaggagacagagctgctcagagatgttaaccgatccctcagagaagaaaacgtgtttctcaaggcctcactggaaaaaactggttctgctcaacctggtgagaaacggtaccacttgagtggttcatctcattccctactcccatgtttgggatgtgccatttgtctagaataggaattagtttaaaaaaaacttgtgtgtccacagaagccagcagaggttgtcagatgaatcccataggactggagctacagatggttgtgagccaccgtgtgggcacttggaattgaacctaggtcctctggaagagcagccagtgctcttatctgttgagccatgcctccagctccagaagaataggaaatcttaatgagttaataatttatatcttagaccataaacaaaagaccagaaccctttttctgttgcccttaagatttgagtgggtcaaagaaatattctgataagacataaaatgtcaccaaaactgggcatggtgacatacacctttaatcctagcacacaggaggcagaggcaggtggatctctaagtatgatgccaatatggtgtgcagagtgagtgtcaggacagctagagccacacagagaagacatgtctcaaaaaaaaaaaaaaaaaaggcaaagcaaaaataggcacagaaatacttgaatacagatgaaaaatactttttttttgtgccctagcctggaggccagataatccagagagagttgaggctaagcaaatgtgtgctcagcaagccagctgcgatgcacagctggccagagctctgaaggtgttctaccgaggcatgagcatggccagaggacagctcctcagactgaggcagtgcagacctcctgtgagtacccaggcccctgcagcactgcagcactcaaagagcactcccttaaacctacagatgtgactgcacagtggagggaggtgtgtgtgtgagcggatgagcacactggtgccttaaaagtgtgggttctagctgggcggcggtggtggctcatgcctttaatcccagcaagtggaggcagaggcaggcggatctttgagtttgaggccagcctggtctatagagtgagttccaggtcagccacggctatacagggaaaccctgtctcaaaacacaacaacgaaattcttggtgaactagaaatcaaatggaaagtcctcattctcatcagggaaatattaggcagatggagggccccgtgactaacaattgacagcattcctttcaaacaaggaaaagcctagggttctggctaatccactcctgcactttcaggttttaacattttattttttcttcagcatgcaggaagaccttggtaaacataagttcttgtcatcagaggccagctgagagcaggctagcttgctcagcactgagaatactcttttaatttatttaaataacttttttttcatttattttacacactgtaatttccccttctccctctcttcccagtcaccctcttccccctcatttcccgtcaatctctgtccccttccactcctccgcctccattcagaaaggggcaggtctcccatgggcttgaacatagaaagaaacatggcacatcaagttgaggcaagactgagctccttcccctgcatcaaggctgggtgaggtaatccagcatggggaaccggctcccaaaagccagccaatcaccagggacaggtcctgatctcactgctaggagccttacaaagagaccaagctacacaacttttacatacatgcagagggcctaggtcagtcccatggtggctccctaactgtaggtccagaatccatgagcaaccatgagctcaagtcaagtctgctatctcggggcggggggggggggggaaggggagggggggttccccatcatgacctcccggctcatataatccctcctccctttcttcagcaagactcctggagctcagcctgatagttggctgtggatctctgcatctgcttccatcagttactggaatagggtatctctgaagacaaacaggggtagtcacaaatctgattacaggagatggccagttcaggcaccctccccactatcactaggaagcttagctggggttattcttgtagattcctggaagtttccctggtgccaggtttctccccatcaaaacatctcttttgttactctccccctcagtcctgcctccagcccacctcctgcacccagcccacccaacctgtaacctcaagttcccattcctctatcttctctcccctgcccccactttccccctcccagcgaaatccatgctgccctctttgggccctccttgttatctagctaggctgattatactttacagctaattccaggtatgagtgagtacataccatatttgtatttctgggtctgggttacctcactcacaataattttttctagttacatccatttgcctgcaaatttcatgaggtcattgttttgttttttttttatgtgtgtgtgtgtgtaaatgtaccacattttccttatcattctttggttgaggggcatctaggttgtttctaggttgtttctggctattatgaatgatgatgctatgaacatagttgagcgaatgtccttgtggtatgattgagcatcctttaggtatatgcccaaggttggtataactggttcttgaggtagattgattcccaattttctgagaaactgccattctgatttccagagtggctggacaggtttgcactcccaccagcagtggaggagtgctccttttacttcacatcctctccagcataagcgatcatcagtgtttttgattttagccattatgacaggtgtaagatggtatctgagtcattttgatttgtatttctctgatgactaaggatgctgggcaattccttaagtgtcttttggccatttgagattcttctgttgagaattctgtttggatcggtaccccactttttattggattatttggcattttgatgtctagttcttgagttctttatatattttggagatcagtcctctgtcagatgtggggttgaagatctttttccctttctgtaggctgccattttgtcttactgtgtcctttgctttgcagaagcttctcagtttcaggaggtcccatttattgttgagctcagtgtctgtgctactggtgttatattcaggaagtggtctcctaagccaggaagtggtctcctgtgccaatgtgttcaagactacttcccattttctcttctatcaggttcagtgtaactggatttatgttgaggtctttgatccacttggacttgagttttgtgcagggtgataaatatggatctatttgcattcttctacatgttgacatccagttatgccaacacggtttgttgaagatgctttctgttttccattgtgtaattttggcttctttgtcaaagaccaggtgctcataggtgtgtggatttatgtcagggtattcaattcaattccactgatccatgtatctgtttttgtgccaataccaagttgtttttattactatagatctatagtagagcttgaagtgagggatggtgatacctctggaagttcctttatagtacaggattgttttagctatactgtgtttttttttattttcctatatgaagcctgagtattgttctttcaaggtctcttgagaattgtttggattttgatggggaaagcaatagaaatcctaactcagacaggccccataaataaagctgagaataagcatgggggggggctgggaaggtggcttagctggtagaatgcctacagcatgagcatcaggacctgtgtttaacccaagaaccacatataaaaagccacacatggcagtgagtgtgtaaaattccagtcccagggaagagacaggtggaggatccttggagctcactggccagtcagcctagcctgttcagtgggcttcacaacagatccacctcaaaaagccaaggaggactgttccttatgaacaaccgagactgaccccaggctcctgcatgcacaccctccttcttactctccatacaaaaataagtacaaaccaatttgtatcctaggtcaattaccctgatataaaatgtttcagggtttgttttgatttggggatattttcatgtactttaactggatgaacatctctcactcaaaaaaaccaaaatgctctaaaatctgaaacttcttgactgctaacccataaatatcatcaagtattaatgttcggaatatataaatgataagctttgaaacaggaagaacaaacatgaaaaaaccattggggaaataatggccaaaggatccaaaggggcaggaatctattgacaatccaggaaacaaactggagcccagtgctacgtcacccgtctgccccaccctccccactgctgatgctccctggactctgggaaacctcaggggtacttgcttccacagggcaggggagacatcagcaaatgcctacatctgggactttcagaatgtctatagtactgaaacaacacagcattccaatgtgaaattgtgaactatctatttcatctactcttggtagattcaaacggccttcctgaagtccctgctctaggtccccactgactgctcaaaatgatcccgtgcggctctgcagccacatgggagcacttactggacacgtcattcccacgcactaagcattttactctagtcctatgaagtctactgtcgtcaattttctctttcatttattttttaggaagacgatcaaatgcttcgaccatttgtgcaccaacagtcacagatgctaagggatttggaggacctgcttgaatccagcttacagaagctgaaaaatgacgttgctttcatagtgaagaagaagaaggagtatctactgcatatccaacagtgaggatgagcaaactaaaaactgcaaacatactgagttaatgagcatcattgactcatgtaatggtatctacctgttttaggtaagacatctctacttgccttttttctgataaggacttactatgggaaccagattggccttatctggcctctgtatccccagtcccaatatggggatcacagacctgtaccaccacactggcccttaactggatttaaaaatcctataaaaataaacatatatacagatggtgggggaagagatgtctgtggtaaatgttcagaacctggagttctggatttgattgcccacagttcaatcctggttaaatccatacatacttatatactgtgtacaacatggggtgacttactcactctccctaagcctctctctcctcatcagttatctgggatggttgatgattaccaacctcctgacagacagcatgctcagtaagcatttaccatcagtgctttcctgaaaaatagttcattttttttcttttaaagattttattatgtgtgtctatgtatgtctatacacatgcgtggtacttttttaggctagaaaagggagttgatcatctggagctagaattactgtcagctctactttgggtgctgggcactgatcttgggtcttctgtgagaccagtacatgcttttaagcactaagccatttctccagcatgccccccccttttttttttgagacagggtctcactcttaacccaggctgccctggtcctttgtttcatataccagtactattattgtagatgggagctgacatccctggcttttccattccacactttaaataaagcccatttgattagttttgtttttgttgtcagaaatagacaatggttagttcacagttcttattctgtactctgctctgaacaagttcacccatccacaagctgcctccacttgttttctacgcctgtgtttatttgaaatacattcaattggctcagcagcagcagtgccgtgctatagcatccccgtggtgcagagttaactgttagcaaactcctttcggtagacagctcatcctgcaggggacattgattccacgggtggctagtgagtcctaagagatggagagacactgagaactctaggaagggtctacaaggaaacctttccgggccagggaaacctaataacaagaatagtgaaccttggggctggagaggtggctcagaggtttagaacactggttgctcttccaaaagacctaggttcaattctcagcacctacatggcagctcacaactgtctgtaactcaaggatctgtaactctgtctgaaatagcggctctatctaacagatatatatgcaggcaaaaaaaaacaatgaacatatttttaaaaagtttaaaaaataatagtgagccttagcacacacaccaggtgccagactctaatcataattctaaacatttgttaacttaactcaattctcacaataattttatcacttaatgtatgcagtacttccatgaaggttcctcaaaaaaacagatcaagcaatcccattatatactcaacataactgaaatcagcatgttgaaagctagccacactccatgttcactgcagcattattctcaagctgagatagggctcaagtgtccatcaatgcatggccagacttttaaatatggtgcatatatatatatgagtgctcctccaacttaagaactactttctaaatattcatatttacacctttatgcaaatgacattgcaaccatgaccacaataggtgtggctgcctgcactgggcctgtcagctatcaatcacagattgggtaggggcttgttaggcccccctgccactccctgccgaactactgactactgacagaactggagcccagtcactgtcttcagttgtgtactccctgataaacccactgggctccaatggatagctccaaaaccatgggtacccagaaggccatggtggttaaactcagtgggttacagaacaaaaaaggtgtgaatgtggggaagccactggtagggttgacaggttaaaaggggatgaatgggggtgtgtgagagaagccagagtgttatgtacatgaatgaaagttcaaagaacaaatacacattttctttaaaagcaggaaactctcatttgtgacaacacagataagcctagaggacattgtggtaaatgaataatcaaaatatatagaaagaattattatataatctcttatctacaaaaaatacctgacagaactgactgtgggatggtatctgccaggagcttgaggtggtggtgaactggaaaagtagtccttcatcaatggtacatattacaaagagtaagtctgtgtgctctgtctcaggctaactgaccagttaacagtgacttctcatgacaaattgtaagtctgaggtgatggacgctattacttttgtttattctataatgtgcacatgtatttttatttatttatttatttatttactttggtttttccgcaacagggtttctctgtgtagctttggagcctatcctggcactcgctctggagaccaggctggccccgaactcacagagatccacttgactctgcctcccaagtgctgggattaaaggcgtgcaccaccaacgccggcgtgtacatgtgtttaaatgcatcttttttttttttcttcttcttgagacagggtctaattatgtagccctggctatcctggaacttactctgtagactaggctagtcttgaattcacagatatcctagttggtttttttttttttttttttttttttttttggtttttcaagacagggtttctttggtagccttggctgtcctggaacttaatctgtagaccaggctggccttgaactcagatgtgcctgcctctgctcctgagtgctgggattaaaagcatgagccacaactacccagctgtcatccccagtctttgagtatatgtatgtcatgtaattattaggagaggaaatgttctccttagcatttcaataccaaatatggctgaaatgcaaaaagaaaatttgagagaaattctgctgaggttgtcaagatcaatagaaagtcaaaagccatttgcttaagactaatcacagttatgaatgaaatcagggacaaaaagaagcattagtccactagattttagtgggctttaaaggccactttaaagcagtgctgatgcacaaaaaaagtatggaagtccaaaccaaaaaaaaaaaaaaaaaaaaaatccatcattcaattaacaaccctttattattcaacttaggtaaacaatccaaaatcagtccatgtagatggatgagaaagcagagtgaaatagaaaaagtacagttttacttagcagatgctctcactatgcagaggagcccccaggagggagaggttccacatcaccttacaaggaaggcagaagtcactgccatagcctaacaccagtcgagccccatcactaaggaatgctgttgggacacaaacagggaccttcactatccgaccttccagttcatttgtcaataaacaggtaaggagaatatcagttttctctcacaagcaataaaatcataaaaacagctgaggtatgaagtttaggataagctagtataatttcctgcttttaatgtatagatattttagacctgacagtcttccacatacagtcagataggtttatagaagatttcacataatagcaaatacagaagctgttcgtgcatcttatgattcagctaatcttcaaatgtttagacttccgagctgctaatgacactaaattcaatgccatgttggttgagtctgtcaatcaactttgttctggagaaagcagctccaggtgtaaagacaccgcccctgtaaaatagtaacaagagaacagagttcgtgtggctccctcctctccagtcctctcctctgtaggactatcgatcgagtcactgcctaaccctgaaaaccagttctttcctgtcataggggattctatgtgtattacttaatactgtccgaggctgtgcctgacttgccatttgcttagttcccagggcaccagctaaatgctcagtaagagtatactccataaacacctttgcagcacccatgactcagttccccagttgctgccaggactcccctgccaccaagttgtatgctctggtgccctgaacaacactgctggataaacaacacacccttttctgagtgctaggctctagacttgagtttctgggttttttgttttgttttgttgtttttgataaagaacagtaggtagcttacatggctctcactcaccttcacagtaaatcctaaggcagataaggaattgtccttggcattgctttaacatatatctttgggccaaagaaccaaaaacttgtatgtagacccaggactacaaaccaactcaaaagcagctaagatgtcaccaggttgaaaacactttctcactagaagaaatccaaacttaccctttagggagatcagaggtatcattcagaagagtcatggcagcctgaaccatggctattggagtagtcacgtagccagcctctgtagagaagggttgggcaaagaaaaatgattaggaagtgagcatcacctcaaaaatcaatggtgaatatacagagattctcttagcccaaatgatgattaacatttatttagttcatatatattgaatatcctttgtgattttttttttttttttttttttggagacagggtctcattgtgtaggcctgtcagggccagcctggaactcagagagattcctgcctcttctgagattaaaggcatgtaccactctgcctagccttggagataatcttataaaattttttgagcacacctgcaatttgacgttacccagtacatgaggtcaagtgcagaatctgccacttgtgcaattgttggtctgattttggagaatttcagaacacagctccccacctgcacttacattaggaactgcctatgctaaatgcttaagacaaaactgtttgcaccacagttgtctgtgagcaacaccactgcatctcacttcccatactagggcaatgactatgccacactttccctggtctcacaaagctaaagccaagcagtggttaagccagtcaccctcagctagggctcctgggtcttagcaaccaccacactgcttcctaacaacactggatgctgaagacactcatttctgattctgttagtcctataaactgatccctccttccacatttaacaaaaacaactctcagtatcttaaaagaaaaacatgggggctggagatatggctcagcagttaagagcactggctgctcttccagaacgccagggttcaattcccagcacccacattaactcacaactgcctaactccagttacaggggacacaacacccacacacagacatacatgcaggcaaaatgtcaatgcacataaaatgaaaataaattttaaaaaagaggaaaaacaactgattgcatctattaacttcaagtctataataaagcaagtcattagcatttatatatagtactgtcaaataattgaaacattacctttaaaagccaagttgtaaatcaaaaaggtgtgatgtaaaaaaacctgtcacctggcttgattagtcctgacccacagagactttggtaattacacttctcctgtggctcatgtgagggcttgcctttgcacagtgctccagaaagttcttcagtctttaacaaatcatcagaagttattatgctcacttataaaatgtgtaaatctatatatttcacaaaattggaaaccttaggccacagatttgattcaataaaaattacttaagagactgaagcaggtaaaaatcagctaacttattaaaatttgccatgctcaaacttgttaaattatgaaaaagactagatctgttaatgaaattggctaatgtcaacttgtctatagagagaatttcaaaatactttatccatgcaaatggattctaaaacaccactttacagtcaaagacagtgtaaaaccctgaaacacccttaagacacacacacagtacctggtcctttcacttgggtacagattctgatatttggtttgttcttctcaggacaaaaaccatggctgtatccttgaccaaagaatgtcatcgtaaatgatgagccatccatctgtgaaagaaagagcaaacagtgtggttattgatatgctatttccttctagagcacaacaaaccctagaacacaacttcacgtgagactttttttcctcactaaatgttttaatgggtctcaaaaatcctgtgacagatttttagtttccattaaaaagtactgattttgaacactaactaaactgccttgcgtacacacacacacagacacacgcacacagacacacacacacacataccccacacacacacacagacacacacacaccacacacacacacacacacaccacacacacagacagacacacacacacacagacagacacacacacatatacacacacagacacaccacacacagacagacagacagacagacagacacacacacacacacacacacacacacacacacacagacagacagacagacagacagacagacagacagacagacacacacacacacacacacacacacacacaccacacacagacagacacgcacacacaccacacacccccacacacagacacacacacacacatatacacacacaccacacacagacagacacgcgcacacacacacacacacacaccacacacacagacagacacgcacacacacccacacacaccccacacacagacacacacacacacatatacacacacaccacacacagacagacacgcgcacacacacacacacacacacacaccacacacacagacagacacgcacacacacagacacacaagcacacacagacacgcacacagacacacaagcgcacgcacgcacacacacacacacacacacacacacacacacacacacacacacgtgcgagcgcgctcttttccttctgagggctttatgatgcactgtatcactaaccagatttttcctattaaccctaaatgtctgctgcgaccaacagttctaggatgctcttccaccactgattgagcctggagtggcaggcattagggctgatacacacttagccttttgaactttctgggcagacctggtgactttgccagctcaggcagccttactattcacagcattgatgactcccacagcaactgtccacctcatgtcacaaaaatcaaaatgacccagtggaggctagtcagagaagctcttaacacacatgggcttgcctgggaccacacaagataaggtttttgtttctttgcttttttcaagacagagttccctcgaactagttccagatcactgtgaaccaccacatgggtgctgggaactgaacccagttcttttgcaaaagtagcagtttttagccactagtctatctttccagcctcatatcttatttttgtgtatttgagatagggtctcactgtgttgcccaaggtagacttgaactcatggccatgctaccttagctcccatatactaggatgctaaatgtgttatagtatatttaggatcaggctctgtggtgcccattagggaaagtcatttctctggcctggatggtgatctaatattctaagctacacaaagtagagttaatccagttggaactatccattgcctggccaagggaccacatctcaggaaagtgggttcaccttaaaccatgtaaaagataggagaaataattatccctttaatgatatagcatccctttcctcccagaatctcctcagtgtatttaattacacggcaccatgcagttgccatcaaatctgtccacttttgtgaattactctaaagtttacctgcctgcccccataaggctacaaaggaatggcactgttagaaggtgtggctttgtaggaggaagtgtgtcactgagggagcaggcttgaggtctccattactaaactttgctccatgtaacaatccacttcctgttgccttctgatcaagatgcagcccgtaccgtgtctgcctacacattgccatactccctgccatggtgataatggtctgaacctcaaactgcaggcgagctattccaattaagggttgtcttaaaagaattgctgctgagggcatggtgtctctgcccagcaacagaaacccttctgtctctcctgaaagcattcttttcctatcatttgggcttcaatttcttaaactctcctccctgccaagtggtgaacctccctgccactttaactagaaggcagagctttttcccctactttcttttatctagctttctcctcgggaaggtggcttgtgatttcagcttgctgcctgaagtttttcttttaaactctaacaaaaacatccatgagtaagtctggagagactgcaatgaagacaggaaagccaaccaacagatgggaaaagatccgtgtatccctcagccctcactggagaagcaccttctttctctcagtggactgtgtacagaggaagacactggggtgctcagccctacgtgggtatcttcacaaaaccactccccgcaaggctcagggataagaagcagaggtagtggctaattccaaggaaacagtgttgtccagagacagcaggactgacagaatatacaggacttaacaggctcaaaccagactaagtgccagtgctgagaaggaggtggacacaaagttccaaccctaagaagggtttgatatggatacatgatacatgccaggaaaaggaaaaaatcctttctgcagcagagtgtcgcacactctaaggcaggcccaggagcaattggccaatacaaaactgactccattgtatgtgtgtttggggggagctttttcatttgttttggtatttttgtccattttcatttttgttttgagagagaacaagagagaacataaggttgggtgggaagggaggaggggagaagttgggggaagggaaagaatatgatcaaagtgtattacagaaaacttgaggccaggtggtcgtggcagtagcgcacgcctttaatcccagcattgggaggcagaggcaggtggatctctgtgagtttgagaccaacctggtctacagagcgagtgccaggacagcctccaaagccacagagagaccctgtctcaaaaaatcaaaataagtaataataaataaaaattttccttaagttttcttctgagtccattcttaaatattgtcactaatgagattaaggagcccaggagggaccctgtttcccccggtaatacacagcagttctcgaggactttcccaaattccagtaaccggtgtgtgctgccatggcacctaagcacaggaatgttttctccaggaggattggatctgaaccaaggcatgtgagatacatgtagaggaagagctgtgatgcctgtgtatggttggagaaagtggaagtgacatcacacaaaatggacgacacagaagagggttttaggagaaaggacacagatttcggcacactgaactttaggtgtccacagggtgtggaactgccacaggcagacttgtcaatctggagatgggtgctgctaagagctctgctgggagtgagtgaagaccatggttcctaggggtctgcaactagaagagagaggatactgcagcacagcaggcagaaagatgagggaaacctgaagggcatttatctcagaagtcccccacaccacaacacaagtaaagcaagtttaaaagtgtgttatattagagacctagacataagaaacaactattacctgtttttgtgttggaccttgttttgaaaaataaccaaaggaaaagagccatgggaactaaaagaaaaaacaaaaaacgagcttagtgatactttcaaatattcataagaaatatttctgaagatcttatttcataaaaaaaacttacttttatgagaaggtgtctcccaatgctaaacttcacaaagaataaaaagaaaagtcctgcaaacatcagcttaataacagaggtgatgcctcccaccgttacgtatgcagcatactgaacctaagtgcacaatacaaagtcaggtattaatctagttcaaagaatggtggctacactacacttatactttagttacaaacactgaacaaagcagtttccatctaatgactgcattatgttctaacactgggtgcctaggttttaaaggaattattacaaatggcaatcagcttgctctacttgaacaccaaagtccacatcatctacaattatctgagtctagtaatactacaatcatagctccccctaagagacaatacatttcaccctttatttcttcctccccttccttttcttttcttcctcttctctctctcctttcctctcctcttttgtttaaggcagggtctcattctgtaactcaggctgctggtcttaaactcactatgtagtccagacaggccctggatttactatatagcccaggctggccttgaactcgtagaaatttctcttgcctcagcttcctggattctgagattacaggcataagccactatatctagtttatcttctaccttttaacctgagatagtttcctcttgatgtctcagtatgaatgactatttccttcaccaaaaggagtgtgttggtattctagaggaaggaaggagaccaaagggtgggggccaggacatctccaaaactcactatagaaatagaattctagcagctgaaacactaagcagagacagttgggtggtttttgtggactctgcagcaggctagctttgaatcatgcacaaggctagtgccatgcccatgatctaaccttatacacatttactaacttttttatttacaaatgtggacatcaaaatttcagatattaaacatactgaggaactaaagcaaacataggcttagtcttattaataggccatgtttacttactggggactcctgtaaattttcatgtaagtaacgctgagtcctcttcacaacagacatatcagatcccaaaaaaggaatggaatatgagttcagctctttacaataggaaactggccacctgtaagacagagccaggaaaatgttgcatttcctccaattactacagtgatcacaactttggctaataaatctccaaattaaaaaaaccagaaacctttcttggaatgactaataacaataaggcaaagagtgtgcctttagttcaatgtgtttctaatagttcttcctttgttctccaaacctactcccctagaagcaacaatgacacttgttcttcatactactgacacgtacatgcacagggtttgatgccatcggcttctctggagactgatttacacaccactcaatacccaaatggtcatgtcttaccgctaaagttctcacactgattatgttaaagttatttacactgattttgataaatgatcacttttagagggctggttagagacagggtttcccggtgtagccctggctgtcctagaactcacagtgtagaccaggctggcctccaactcagagacacatctgcttctgccttctgcctaaaatgtagttttataacatgaaactcaactgaaatttagttttaatggtgatagtgaggtatcatataattcatagaaagtattatgtatgtgaagaaatacataaagtatttaaacttcatataatatgctaattacattttaactttgaaaataatttggaatctgccgggcgttggtggcacacgcctttaatcccagctctcgggaggcagaggcaggcagatctctgtgagttcaaggccagcctggtctacagagcgagtgccaggataggctccaaagccacagagaaaccctgtctcgaaaaaaaaaaaaaaaaagaaaaagaaaataatttggaatttatcaaaaagtctccaagcttttccaaccaatagcaatgcaacacacagactaaaaacagtaaagaatagattttaaattaatataccttcttttcaactttgaaccaacaattgggacaggtttcagacataatgtactccgtagtgttcttaaagtacccttatctccaaaaccgtaaatcgctgacttccaggtaccatcatgaatacacaacccctaagaaaacatttcacaagttaaacgtgtcttatgggtaattactgaaaggcaagatcaaataagagttactacatttcaccttcatgtgtgtaattaatcttgataggcatttccatggccaactaggcagcaatatactcgatggcttggttttaatcaccatttaccctaacacaagttccttcttctttcccctgcttattcaagctgattggcactaatatgacagttttctgacctgacttttattacagatgggatcacagtgggatcacagacattcactctaatgtatcagagtaattacatcaccctctccaccaaaaaaaaagggggggggatttactttcactcatgtgcatgccgtatgtatgccaggagtgtccggttcctgcagagaccaggaaagagcattggatctcctagagctagaattgcaggggattgtgagctgtctgacatgagggatgggaactgaactcaggtcctctggaagagtttaagtgctcttaaccactgagccatcatctctgcaacctgtttgtttctacagcttctcattacagactcctgaccttactgcctctgcttcctagtgctgggcttacagtgtaattcactatcttaactttctaaaattaaacatagtgacatagtgactctcacactaaatggacaaatgcattaaaatttaatctgaattttttcccccttttgggtttttcgagacagggtttctctgtattgctttggagcctgtcctggaacttgctctgtagaccaggctggctttgaactcagagatccacctgcttctgcctcctgagtgctgggattaaaggcgtgcgccacatacgcctggcagtctgaatcttttttaggagccatgtaatcatttgcaaaatcttttttagtattagttaaaaaagacagctaggcaggacactgacctcacatcctgagtggatcgttaggaagctttccacagcagtcaaagtacctacaggagtaagagacagtaaaggtcagatcaataaactctaaattactcacccaggacaagtaataacctatgtcagttcaggtggggacatttttattaagcttacagctgaaaaataaatcagaaaacctgcacagacagcagttttatcatgttattatccacagatcaaaacacagtttaaggccaggaggactcccagaaagaagagtttagcatgactctgttagtgttgacaaactctctgtagtatctaaataaacaacgctaagaatcttctccagtaagacaacagcttaacctgctcatcctgaaggctcctcacaacatttagtgggagtgattctgattgaacatcactgctttcaaggacctttcaggagtaactgaaatttactgcaaatgttcagaaaaaaaaaaaaaaaaactcaacaatccttgggctggcttctaaaatacttaaaacatgggctgggaatatggctcagtggtagagctcttgcctagcatggtgaggccctaagtttaattcccagcaccacaaaaaagcaaagacaaaagaaaatacttaaagttgttaagataaaaaaagaaagaaagaaagaaaaacacatacaacagggctagggaggtagctcaggacagagagagagctggtctagtcatcatggctacaaacacagagctcttctgctgtgagatttcagtacccttattgagcagtaattaccgttcatttgctttctggtgtataacactcctagatctgctgggatggagtcaaagccactgcttccaatgatataaacccctttctctgcagctttctcatgatacttcgcatgcattagttccagaaactaaaaaatccaggacaaaaatgtgaatcagagcttatagaaacacccaaaccaatattaaatgatttctcttaaaacaaagccattaaactggaaatgccaacatgtggtctgcagcacagtactgtctgatggttttcacattctgaaaatactaaccccaagctacaatgtgagagaaagcacagagaatgtgctcatctaactaaaaaatatgattattttaggatgtgttttaactatgaagaataacaatcatcattttttttaaatcaacagattgtattacccagatgagcttttccagacattagctatgcatagggggtaagaaaggggatggcagaggggaccaaagcatgcccttccaaatcccggtctaattgtggaggtttttgttttgttttgttgagtgctaggatggaacacagggcccactatgttaggcaagggctccatcactggactacagcttcagctaaaccaaactttaggatagatttatagggaaacaaatattaaagagcttctatgttaattgaaacccagtttctcccattattaacagtttttatattagcatttgttacaaataatgaaccaaaactgtttagtggctaaatcctctcctttaaaaaaattactttcgttttgtacatatgggtgtattgcttgtgtgtatgtctatgtaccacgtgtgtgtagtactgtggaggccagaaaagggcactgaatacccttgtgagcagccatgccagtgctggaaattgaacccaggtttctggaacagcaactagcactaaccattgaaccatctctacagcacccccagacatacacacacatatatacatatatatacatgtatacatgtgtgtgcatggtggggtgttttgcctgcatgttatgtctgtgcaccacatgtgcctctggtgcccatggacaccagaagagggcaagagatccccaggaactggagttatagttgttagcatcatgtgggtgctgagaatcaaacccaagtcctctggaagaagacctcttaacccgagccatctctccagtccctcctcccccactgctttgttaatgggagtatcagggaccactcttaaggcaagcgccctaccactggggcgagtcacatccctctgtactctttattttggcatagggtctctctaagttgcccaggctggtcttgaacttttgagagtcctgcctcaatttattgagtagctgggattacaggcctggcttgaagtccattcctaatttattcatgtagattttacccaatgccctttttctgacccaacatcctgtcctgaataccacaacacacatagacggctaagtttccttggactcccttaggcaggaacaggttttcatattttccttgattctgacaaccttgattgttttggggaacaaagatcaacaattttgtagattatacatctactaaaattacctaatgtttttcttaagattaaactagcttaggtaggaagatacatcctatcaatataatgtattaacttacaatttgtaaatttattgtcatgtgtatacatatgtgtgcacgatgatgggagggacacatgccattgcctgtgtgcagtctgtccttcccatccacatttacatgagacccagagagcaaatgcaggtaactagcctttaaggccagcaccttcacccactgagccatctttttagctgggatttcttgtgtactcttcctgagggcggggcagctgcctaatctcccctccctccctccctttctttctttcttccatccttttatgtactggaggccaaactcagagatttgtgcttgcctaccactgagctaaattctcaaccttttctttatcttctcaccattacttttaaactgggttatttgtatttttatatttcccttattgatatataatagttctccagggctggcaagagggctcagcagttaagagcattggctgctctccctgaggacccaacacccacatagcaactcacaaccacctgtaacttcagttccagagtaactgatggcctcttctggcctctacagatatcgggcacagcacacagacatgcatacaggcaaaatacccatacacataaagtaaaataatctttaaaaaatggtgttctgtatattctgggcctttattggtgcttggaggaagttatgtgtttctgtttgttctggtcttttctcaatatatctggggccccaagaatgctatgcctcctgcacacactttatttccaaatgcaaagtctcaataaatgcatcagttaggaaagaggacagaagggcagttttgattgtcagggtaattcctgaccctagttttgttttgcaccaaggtaaataaacagccaggagcaagactgggacacagggaagaggagtgaggaggggacaaagtacagacctgttaggctgtgatactactcttttggtgagttataaaacaacacacaaattcttcacaattttctacgctctggattactttaaacaacacagaattgttttttgtttaagccatgtgtccttcctgctctgatcaattttggtaattctcactttcctagtgttttccaatctgtaacaccaattgataatctctaagcacagactatacagaatgctggtgacggtcagtagatactacagagacgcgtgaatctacattgtgaaggcggtggggactttagtgcctcttgacacagaaccccccccccacagtgcagccatttactaggtgtactagtactagtactagtacttccatttactaggtgtgtggctatgagcaaatgacttcatcttttaagcttccatttcttcatggataaaacagggaagaagaaaagtacagacactatttttttttcctgaagagttacataaggtgctcagcacagtgcttagcaaatgaaaatcattaaatatgatgagaacatttacattcaattacataatgtatactttatataacacacacacacacatatttgctggggattgaactcggggcttcaaacatactaactacatggtctaccactgagttgaccacctaacccaccatccctcatttaaaactttgaagctgttgggatcccccactttttgaaatagggatttcactgtgtagccctggctggcctggaacttgttacgtagaccaggctggccttgcactcacagggatcctctcacttcctttgttttgtgttgttttgagtaagggtcttttgtagccaggttgggcttgaataggataaccctgaacacctgctcctcctgcctccacatcctgaaagctaggactctaggcatgagccaccaccccaagtttatgcaccatagggaatggagcagactcaaggtctggtgtatgctactcagtctaacaactacagaaatccccagcccaaggtaaggagactttacaattatttttctgtaatgttgtaaagacacttgttttaaaaagggaaataataatgaaaatgttactaagagacacagtctgagaattatgacactgtgttaataattcatcttacagaattcagtaactataaaaaaaaacagcacatccgcacacaatggaaataactacaatgcaaaatgaacaatgaagctaagatcatatcaatgttcttcctcaagccagggactgaacaccatgagaccaccagctctaaaaactagaaatgcagctgtcagcttccaaatgtctacagaatagtactaaatatgcttgcccttcacagaaaaattatggatggctagttttgttttctctttttgatttacatacctgaggttccccacagatgtcaatacaacttgttccattttcaatacatgcttttactacaggttctccataaaatcgatactggggaaataaagaaaaccaatgagttattcttacttcacaagtttaactgaagcaaaggtcatttatacaactgggaaaaaggctcagtatgtaagtacctgccaaacatgcatggagaagagttcagatccccagaacccacgtaaggaacctgagatagtattacctgtctgatccataacatgtatataatctcagtgttcttttgttgttgttgttattgtttctttgttttgtttttcgagacagggttctctgtattgttttggaggctgtcctggcactcactctgtagaccaggctggcctcaaactcacagagatccgcctgtctctgcctcctgagtgctaggattaaagacatgcgccaccgccacccggctaatctcagtgttcttatggtgaaatgaaagttggtagcagaaggtctggaagctcatgggccagctagcttggaatgtgcagtgacaagagaccctgtttcaaacaaggtagaaggttgttctctcaccataactgtaccatggtgcatacacacacacaatcacaaacaataaaagaccacttcacttttagaagcaaaatattaaattatcaaaaaatcaaatgtgtggctgataagatagtttagcaggtaaaagtacctgctgtcaaacctgagaacctgagttcaatcctagggactcatatggtaggacaaaatagtatcatactgataaactggaaaaataaggtaactgtactgtactgcctctcactgtgtgtaaagacacaatggaatcagaggcatgcaggctggggaaatggctcagaggttgagagcactgactgctgtggtgatatttttgtttatgatctaataaaggctgcctgaagatcagagtgcaaagctaaccacagccatagagaccaggcagtggtggcacacacctttaatcccagcactcagaagacaggcagacagatctctgtgagttcaaggccaccctgggcagcatgagagtgtatcagtctaaaagagaaaccgagctcataccttgaatcccagcactagggaggtggaggcaggagtgacatggttgggtggagagaggaatataaggcagaaagagacagaaatgaattgcagtctaggcagtctgaggagcagtgcagtttggagatgcaatcagagcacactatcgccccctttggtctgagcattggtagaggtgagaactctctagcggctggccgctttgcttctctggtcttcagctttaaccccaatatctgtctctgggtttttattattcgtgctacaggctgctctttcagagggcctgggttcaattcccacacccacatggcagctcacaactgtctgtgactccaagatctgacaccctcacacagacagatagacatgcaggcaaaacaccaatgcacataaaaaacaaattatgaaaaaaaagaaaaaggaatcagaggcatgctgttaatctccaactaaagacaaaatgggaagttttatagaataaataatttacttgagttagatccaaaagcacaaggatttgtatggaaaaataaaaataaaagcaaaaatagatgtacagatataaaaaaaagaaagctattattggtaaaagcacaagctggctgagtctgaagtagtaaggagcgagtttagaaagaaatgctaaggccacatggggaaggaccagaagtgtcacctaccgcatacacacacacacacacacacacacacacacacacaccccaggactgttcaaatgagccagctgtgtaggcacacagcactcacatttaccatcttttctgttattaacagcggcactctacaagcaattctcaggtttgaaaactggaagctttctttcaacctacctcccctgtaagtcagcaagttttgtcaagtctgtccatattatattacctctcccctaattttctacaaatcctccagtcacttcacagtaaccaatctagccaatttccaaagaaatgtcaaattattattttaaaataaaacctggattcaacctttccttctttcccaattatgttagtttatccagctttccagtgcctacattataaagtctaaacttacctcatcacaagttcttaaccatcgtgtcacgtcacagccccttcattctcatgctccagccattctaaagatgatgtaatgtcacacccagtggtgtttgctgctaccacctggacccacctctgtctactatgcatctgctggcctggctcctaacagtatagcctcaggctcactttctatgtctctcgccttactgctttgtcacacttagccacttaaccattgcgtaatctgaggacgctcccactaacttatctctattttattatgctgttaagattttttttctttattgggcctggagagaggtcagtggttagagcacttactgctcttgcagaggacctaagtttagttctcagtacccacatcaggtacttccaactgcctgcagatccagctccaggggatctgacacccttttcttgcctccataagatcctacacacatggtctaaatacacatgcatataaataaaaataaaaaacacaaagattttctttattagactcctgagtttgtacaaggtaatcagaaagactcagagtaataatctttgattgctcatcagttctcaacacttcatgttctagccagtaggctcccaggtaagtatacctccacctgtacctccaccaggagtatacaaagtgatccactgagggtgacagtaaatatatttatacatttattcatgctaatttggggcatgaaaaataatgttattactagttgatttttttctcaaaatacttataaattaacatgagaaataataactgaaataaatgtggattaacccctgggtcatgtcaggtggtcaaataccaaatataggatacaggtggtactcttaagtggcatgggagagttccacaacatcaagggagctacaatgatagcatcattcatttagctcttttctcctactgctgcctaatgcttgcttacacatgtctaacagaggagagtctgatgcttaagctctgaagccttgggtatttagagagacgatacaaagatccaacagtgaagaactatgagcctgatgggtaggagaaaaactaggagagaattcaaaaaccaagtaaacaacagagaaaatgagccagttatcattactcacaaccataatcctagcattcaggaagctgagataggtggattaccatgaatttgaagacagccaatgctaatagtgagttccaagacagcctggggttgtcaaataagattatatctcaaaaattaatgaaaaaattaagaaaaggaagaaaattccagcacgattgcagagaggtggttcaagatgaggactgagaggagcgcatttggcaggagacctgaaagagagagggcaaaagagagagagggcaaaagagagagggggcaaaagagagaggggggcaaaagagagagagggcaaaagagagagagggcaaaagagagagagcaaaagagagagagggcaaaagagagagggcaaaagagagagagggcaaaagagagaggggggcaagagagagagggggcaaaagagagagagggcaaaagagagagagggcaaaagagagagagcaaaagagagagagggcaaaagagagagagagggcaaaagagagagagagggcaaaagagagagagagggcaaaagagagagagggcaaaagagagagagagggcaaaagagagaggggggcaaaagagagagagggcaaaagagagagggcaaaagagagagagggcaaaagagagagggcaaaagtgagagagagggcaaaagagagagggtgagagagaaggcaagagagagagggcaaaagagaaagagggcaaaagagagagagggcaaaagagagagagagggcaaaagagagagggcaaaagagagagagaaggcaagagagagagggcaaaagagagagagggcaaaagagaaagagggcaaaagagagagggggcaaaagagagagagagggcaaaagagagagagcaagagagagagagcaagagagagcgaggacaaaagagagagagaggacaaaagaggggggcaaaagagagagagggcaaaagagaagagagggcaaaagagagagaaggcaaaagagagagagggcaaaagagagagagcaaaagagagagagggcaaaagagagagagggggcaaaagagagagagagggcaaaagagagagagagggcaaaagagagaggggggcaaaagagagagagggcaaaagagagagagggcaaaagagagagagggcaaaagagagagggcaaaagagagagagggcaaaagagagagggtgagagagaaggcaagagagagagggcaaaagagaaagagggcaaaagagagagagggcaaaagagagagagggcaaaagagagagggcaaaagagagagagaaggcaagagagagagggcaaaagagagagagggcaaaagagaaagagggcaaaagagagagagggggcaaaagagagagagagggcaaaagagagagagcaagagagagagagcaagagagagcgaggacaaaagagagagagaggacaaaagaggggggcaaaagagagagagggcaaaagagaagagagggcaaaagagagagaaggcaaaagagagagggggcaaaagagagatggggcaaaagagagagagagggggcaaaagagagagagaggacaaaagagagagagggcaaaagagagagagagggcaaaagagagagagagggcaaaagagagaggggggcaaaagagagagagggcaaaagagagagagggcaaaagagagagaaagggcaaaagagagagagggcaagagcccggcgagagctggttagagtaggagtgcaggaggcaacagaactcttctaagaagcttgctttacacagggacacacaaaaataggacagttaaaagggtttatgaaatcaaggtgagtgacataatcacttaagtactgaaagagaaaacccaacagggacctcacaatcacccgaatcaccctagaaaatgactaattcatgttgtcactgtggcactgtatgtgtgtatggaaatctcccatgccaccatgatctggcctcttctggcctgtgagcacacacacaccacactgtcacagcaatattatcttaacaagaacaaatccaataaagataagacatgtaattataaacacaaagccttcaaatgttgtgcgcataggcacaagagtttttccttgtgacgaggtggaggcaggcaagtcaataagcagatctggtagcatgaagacaaagaaattctgtcctggaggtttctagtttcataggcaaaaagagctcatgcctataatcctaggagtcaggagaaactgtggctagatggttgtgatttgaggataacctgggctgcaccacaatatcctttcaaagatagaaaggaagggatggagaagggaagggaaggagggaggggctggaaagaatcaggtaagaatgagggaatgagtcagagtgtaaaggaagagttatgaacccccagactgcttcagagtagatgagaacagccaggggaaacagacgatctggggtgtgggactcaaaacagtgcttgtaactgtttgattcaatgcaggaccaattggcacagaggggctcatgttcaggtgaggaatttcagtcagactatccagggttgggattttgctatagtactaaacaaagaagaacaaaggagttgttgttcagtgttgcactgattacagcaatgtacttggtataatctaagctagttaacaagaaaaatataaacattaacattttagatgtttagctttccaatatattgccaattatgatggcttcttcagatcagtaaatactatcaacagccctcttgtaaaggtcaaaagtttagaagtgatgttttcctttcctttttttttttttttttttttttttttgagacaggatctctctgcttatccctggaactgactctgtagactctgttgtcctctgcagatcagaggataactttcagggatcagttctctccttccactgtgtaggtcttggagactaaactcatcttcctggttcatcaaacttttttttttttttacattaaaaaagtaggagggtagggggatccaatcagcacattctccaaaaacagtgtcacaaaaagcctgacactattttggaagactttggtcctatcaatcaaaagactccctatggaattaaggccttcttcccttattttcctctggaatataaaataccagcctttgctggaaatgaaaggattgtttgttctgacacaaagaggggttgattacttacaggtcctacgcagttgaggacaagcactgcctttttagccatctcatcaagcgaggctggattgcagacatcacatattattatcccaacttcagacgacagtgatggtcttcctaaagtcaaaagaatcaattcaccaaagtctacgtcaatatgagaccttctagatcacctttttcacagcagtcagtgactgcaaacttactaaatgtactaacatactgaaagctttcagccatggaaactttacagtctagtttaggtgctgagtagaggactgctctgtcttcctctccaagatatttctgtcacagaactagctactaagcagttatatatgacccaattataggaagtggaaggggactgtcaagagtcatcaccaggagaactaaagaggactcagcccaattcactttttatcatttctcgtttattttttattttttgttttttgttttttttgtttttttttttgagacagggtttctctgtgtaacagctctggctgtcctgaaactctatagaccaggctgtcctggaactcacagaaattcacttgcctctgcctcccaagtgctgggattaaaggcgtgcactactgccaacccccacccctgctccagctattatttttctaatgtatgtgtatctgtatgtatgtatgtacatttcactgcaggtgtccaaggagacccagaggtctttcctgaagctggagttacagggaattgtgagtcacccaacgtgggtgctaggaactgaacatggatccttggcaagaacagtgagacatcactccagccctgtgaattcatttttaagtagttcagcctacataaaatcattcaagcatatatgaaaataactggaattaactgacccaaaagagcaatgcaagtctccactggttaaggcatactctccaaggttacctaattttggcattgtggatggtaaataagtaactaggcaataactatggagctgtagttctcaaccttcctaatgctgtgaccctttaatacagttcctcatgttgtggtgacccccaaccacaaaattacttttattgctacttcataactgtaattttgctgctattgtgaattattatataaatatttgtgctttcccatggtctcagacaacccctgtgaaagagtcatttgacttccaaaggggtctcaatccacaggtttaaaaccactgctatagagtctcactgaggatgaaaaataaaggaggaatgtattttaataatgacatgttttccagcaaacagtaagtaaatgtccataaattctttgtcaaagttctctgttagcagtggcagcattaagagttgtaggagggggtggcgagaaggctcaggggttaagagcactgactgttcttccagaggttctgagttcaattcccagcaaccacatggtggctcacaaccatcggtaatgtgatttggtgccctcttctggcacgcactgtatacatgataaataagtaaataaatcttaaaaaaaaaaaaaaaagttgtaagaatatgtgataggtagggttttagttggggggggattggtaggggaggaagggagggagagggaactgggattgacatgtaaaacaatcttgtttctaattcaaataaaaaaatctgcaaagaaaaacaagagttgtaggaaaatctagcttgcatgctatcttctaagtataaccacagaacaaaagattgtattctcactctcggcagggctctgtgtggaactgtaagacagaacagaaagaatgtagaacaagtgtgacttgtcttaggtggagatttagttgccagactccaaggctactgggttctaagtcaagtgcttcccccaatcccccaactagagtgtaggacgtctgtgtgtgtgtgtgtgtgtgtgtgtgtgtgtgtgtgtggtgtgtgtgtgtgtgtgtgtgtgtggtgtgtgtgtgtaccttctcactcccaagcgtgcatcacaacacaaggcctagcaagaaaaatactacccaataaatatatgttgaaagaagtcgaaagaataatagccaaaacataaaaagctggggggggggaggtaaggaggagatgcggggagtgagtccacatttttatgaatacgatgactggagggagcatggcagtgctaacatcagcacttgggatgatgaagcaagaggatcactaggtcctggccagcccacattgcctcatacaaaatagaagtgctggagtatttctacaatgtaaaaaaaaaacacacacacacacacaaacaaaagcacaacaaatgctcctgggataactcaggagcccagcgcatgcttgcttagcacgtccaggaagtgctgagacaaatccctatcagcaaaagagataaataaacaagcgcactacaaggttatttattatcgcacctccagctttctatcttcttgttcccggtggacctctgcgaggtcagtatcttatttccccttccgaaccaaagaaagcaccgagaaccctccaaacccatcagaaccacagagacgggccgaggagctaccagagttcttatttcgacagcggggctccccaaacccggggggtagaggggccttttcatcctcccttccccgccgctttcgttcatttaggggccaggcgtcgggtcctcgggcagggctcgctgctgtcgcacacggggagacgcccccccggcgacccgcgcccagccctgccctgcccggccctgcccggcccggcccgccgctgctctgcgctgcgctgcgctgcgttacccagcttcagggccgccttctccagcacttgctgcagcttctcctgggagcggcccgccacggcccacggcaggcgggagccctgctccgtggccacctgctcccgggccacctcctccgtcacgaactggccggtgaagccagaggcgccgaacaccaccaggtggaaaggcctctgctccgtcgccatgacgagcccacagcgagccgcagcccggggcgggctgagtccaccgcgcctgcgcctcaggccgcgaccccagtaccgggcgccgcagcaaccgccgctgtcctggccgccgtcgccgtcgcagtcgccgtcgccccgctagagcgcccggctcccttcggccccgcgcgcggccacgcccacggccgcccacgccgcctcgcgcccccccggctgcgcggcctcctccgggcgggcgccccgtgcggcggcggggcctcggcgggcgcgggctgcaggtcggcgtcgctggcggacaggagcggccggcgcccatgttgccctcggccccgcgacccgcaccgctctggccgccccgagcgcgtcgcgtcctctcggctcccccgaggccggagcgggccgggccggttattcccgctttcttcccccgggattgcgaaaagagcccgcggaggggtcgcccacgccgagcgtccggcttgctcgtgaagcccgggtggaggcggaggtgaagcgtattagcaatcaggaacgagggcgaccgggctgagtggttcctgggcgactgtcatccagcctttgtgttggtgaattggtcagagacaattgctttggactaggtttactaaaataaaataaaaataacaatagtaattccatttactctcttatttgatgtctgtctgtggacctgtgtaggagctggaggagatctttcagatgtcaggctcggcagtaagtgcctgtacctactgagctattctgggagctactgcacaccaaacccattcctgctaattgagaggtattatgcagacagcaaaatgtccctggggtacagaagctgggccagtttatttaaatgacctgtacccaacgtagtcactcattttgctccatttgcagttttgctctgcaaagctcccttgacctaaatactgtctggatttcttagaaccagttctggttttgagggatgcccaaattatggataattgttgagttgttttgttttgttttgttttcaagacagggtttctctgtagctttggaggttgtcctggaactcactctgtagaccaggctagcctcgaactcacagagattcatctgcctctgcctcacgagtgatgggattaaaggcgtacactaccaatgcctggctgtgttttgttttagttttttttttttgtcttaaaattgcttaaattttattgtttttgtttgacacaggttctctatgtagtcctaaatggcctcaggctctgggtcctcctgcatcagcctctgaatccatgtgaccccaaagccccctccaaagacccccttttaaaatgctgtagttactttactcaaactatcaagaaatacttggctagagagatagctcagcagttaagcacacagagaagccaagttcgattcccagcagcacccacttacacgatgcacagacacacaccaaaatagtagtaatagtaaaaatacctgacagattagcttctgctgaggacaaagcttgtttggtttgcagtttgtgtgttcacagtctttgatctaatgtgcctattgctttgggtctctggtgtttgttctgatggcgatgactggagttcaaaacagagtaaattactcacttcctgatcaagaaacaaaggtagaaggggttgtctgctacagtcccccttgtagtctttcccccagtgatttaaggacttcaattgccctccccacaaagtttccactaccttcacacggtgcttcccactgcctcaggcagaactaacacagaggcaccatcaacagagctacaagcaggaggaggatcttctgagagttctgcacacacctgctccccacgcctactacctttcaatgcctgggcctttggtggatgctcaacgttcatgctacagcattctgtagatataaaactactcccgaatttaattttgtaattgtgttctttgtatctagtacatgtaaaaagtcatttaatgccattcagcaagcattcccagggagcctcctgtgtgttcagctctgaaataggatctatgaatacatgactatgacacggcatttctgtccctaattggggcatagatgcttaattgctgtatttgtgacaaatgaggagaggagctaactctaggcagaataagcaaaagacgacatttgtcccaggttgtactgttggtgtcaaacactatgccgaggccccttgggtcatggggtaacttaattcactgaaaaagagtccagaaaagcagccaatactggcctgggttagcagggttttgatgggaatggcttctgcacatatgtttaccttattggttgatgaataaaactgttggccaatagggcagcaatataggtgggactagaagatgaggaggattctgggaaacgtaggcagagtcagttgccatgtaggaagtgagaggagtaacaggtctggactctttctctggtaagataagaccatgtggaaataatgtggtgaataactgatacgagatccataaggttaggataacttttagtagataaacgccagccaacagcaagccacagtgtgccaaagcagcaaggtgggagagcgcccatgtgccttgtctgtccctttaaaacctctcctgcatcaccctgacatctccttgaccacacccttacgggcgtggtcggacacacccgtagccactctttaggaggtgtggttatggtgtggtgttttgcatgttaatggctcccatgggcccccaaatatgtttgaatatttggtccctagttggcagctattaggagatgtgaccttgttggaggaagtatgtcactcaaggcgggctttgaggtttcaaaagactattaccattttgaattagttctctctgtctctacttgtggatcaacatatgagctttcagccgtttctggcactttttctagttgtttcactgtcatggatcctaaacctctaaaactatgggaccaattaaatactttcttttgtaagaagccttggtcatggtgggtttgttttgtttttttgttttttgttttcagcaacagaaaagtaactaaggcagctgttttctgctgctatgataaatgcctaaagctaagaactttaaaaacaacaaaaattacttagcttaatgttaaaaaccaaaagtttgttgggcagtggtggtgcacacctttaatcccaactttcaggaggcagagacaggtggatctctgtgagtttgaggctaacctggtctacaaagtgagttccaagacagcaaggctacacagagaaaccctgtcttgaaaaataacaacaaaacaaataaacaagttgaaaagttcaagtttaggcagccctaactgtttagtctctgttcaggttagccatctgtttatggaacatgggaaaatggtgagctaagagtttacctctgtgtcagagtgtgctcagcacacacgaggcactcagagctgaaaaaaggaaaaaagaaagacaaaagagcacacagagagaaagaaaggctgactttgctttatcttcccactctgatgagaactaaaaggtgtcaccatgaaattaatgggcctgtccaagagcaatgcctgggaacctggcttctcctggccctgcttctcaatggttccaacatttcttatcactgcacttggaccaagctacacacgaatgcttgggaaacatgcccaagccacatgtaagccatagcacagatagcgcctgggtctgcttcagagtaattcaggacacagactggcatcagaagttagaaatatcccttaacccagatgtgacagttatttgtggttgctctaaggatgatatttaaatgaaaaatttaaatactcctgagatgattaactgcaataatatacactctgctggctagttttatgtccagttggcacaaactagagtcattttgaaagagggaaactcagttcagaaaatgcccccaccagaatggcctggtggtgcattttcctgattgatggctgatgtgggaaggcccagctcactgagatagtcacccctgggctggtggtcctgtgtgctatataagaaaacaggctgagcaagtcatgaggaagtggccagtaagtggcattcctcatggcctctgcctctgtttctgccctgcttgagttcctgccctgacttccctcagtgagggactataatatgtaaataaaagcgaaataaacccttttctccccaagttgctcatggtcttggtgttttatcacagcaatagaaatgctaataagacacatacttatttttatcatatgttgacttcagctaattatccacccatacctagctgtcagacacgctatttctgtagttgccatctgttacctccacacatgagttgccaaattccatatgtgatataactcacagtcctcagggaagatttattttgtttgtctgtcaatctctgtcttccaggaacatattggacaggcaaaggctgtcaccccacttgcctcagcctctgttatccctaggtcataacgttaggctgcctggcagttatgatgtaagtgccggattcctctggctttaggccttgctttgtccttttctcttctcactcttgctttctcgaacacacaaatgaatgctctattccccaaggttttttttttttattaatttttttcctatgtgttacatgaacttaataacacaaatgcatgcaaaaccctaagtgcttgtaagaaggaaaaacaaatattgtatagaccgtttcacatgatgtaccgtctatgatcaccggggtgatacatcctacaaaaagtgataacaccaatacggatgtcatgtggtgagggctggtgttcctaaattaatgaaaagtgtttatttgcctgcatagttttatgaacataaaacttttcacataaaatatcataaagtattttatttatttatatttaaaaacttgtaaacttgggtttacaggtgttggaggtcccgtgtggagtgctttggggctttttgttttaactgcacagtttcttttcgggctctcatctgtgaggatgtcttgctttcttcctactgattttaacctgagaagaactcttaagtcactagatggagctctttggttcctctcgtccaaaggctgtacggtttttccttggcacaggcactttccaaatacaaaggcctaggcacactctgataactcttccgacctcgttgattagacatagtgactctgtgccccacgggcaccttggaaactcttctgtttcaggacacagatgacatctggttcactctcttggagagatcaacttcataaactaagcttttctttttctttctcctctcctcctcctgtgcctttcttttctccttttacccctcctcttcaagaccattctcaccgtgtagtccaggctggtctcagattctctccaatttttctgtcttagcttactgaatgctgtgatcacaggtgtacacaccactttttaacgaagcaccgtctgggcagaagcattcaccatacacaaaaattcagctttgtcttcgcgctgtcttgcttgtttgagttcctgtatgaggggcatagggatacagtgtaagctctgccagtagcggataccattcctcttcctgctgggtcacagaagtgagcatgcctggtgtaggagacgtgcaagcaacccgtggaagacattgcaaagcacttgctaacacctagcaatcaatattaacatgaacatttttttatttgaggctcctctttgaggtacctaagcatctgtgttaatcagggttctctagagggacagaactgataaaaggaggtgctccggggctcaaaggccagtacagatgctcctgtttcctccctgcagtgggtaaggagcacatgcccacagggctagcattaatgctctgttttgttcacatatttccccctctgtcctacacacactgagtgctaccaagagccaagaaatagaaactggcaacagtgaaccctggttttctgaccccttgcttggagccgccagtctgggtggagctagaggtgggaaactcagagcttgaggaagggtctgttttatagtcagatggaacctggggtgcttgtgtaggtcaggagcagccaaaccaaggcaaatggtggcctctgtttctcagtctgtaccaggaggagcagctctgaaaggacctcagaagtgagaagcagctgccccacctgcttcaccactgaaagccacagtcatgatgccatttcatgggcagtgccactggcgacagccatcatctgacataaggaaaaaatgtgagaacaggctgtaacgaaatgaggagatgccggacagcatgggatgaacagacctacgtttggtattagctcaacctgtggaggtttcagtgaccttgaactcagcactcagactctgatctgttgtttctggaaggcagagttaactcttgtcatgttcaggaagatgtattttgatggaattagggcacaagaatctgagttcattttctgactcagccactttctgagcgtgtgcccgtgggatgttgttgaatatcaccgaattacttcagttcttatgcaaggatgtgcagcctcataaactgtcgtgaactaagtcaggtaacagttctcatcagtgctggaatacagtgggactcagctagtgttgtttttccctgcctaactcaagcagcccttgctaccaagagacagcacaagcatgtagcctgcttgtattcctcaggaatagtgtttgttggccatgttgcctcaaaattttaaatatcaggtcatgaaccatgttgcctagcactgagtcaagcatgcagaaaccacagaataaacaaatctctgccaaacacagacagaaacacacaggccttgacgcatccacccatccatcaggctgacactggagaaacgattatctctaggcttataaattttggaattttccctttcctgagatgctcctgggaacagagtggacccgtggctaacaatactgggtaggatagtatggagaagcaagtatagcctggcagtcatctgcacaacggagtagaaggcctttctcccgtgtcttaggaactttctgctgctgtgacgaaatgccgaaaccaagagcaagttatagaggaaagagggccattgttttcttatgggcttaaggctccagagggtaagttgtccttcatggcagcaggaacaggaagatgagagaagcagagagaactggaggtgggatgtggctacaaactctgatgtcctccctcctgaaaggttcatgaccttcccaaacagctacaaacttgggattgagtggtaaaatacgtgagtctatgggggacactttttcaaaccaccacaccccgatcctgaaatcaggtgttacagctggggtttgggggtgcgggttgttgtttgttttcccagacatggtctcctataacccaggctggcttcgaactcaccaaaaatgaccttgaacttctgatcctcctgcctccccccaactgctggggttgccctgtatcaccatgcccagaaatgtgcaccggtatcacacccagggcttcacagacactaggcaatttctctctctgggaacttgagctacaccctccaatcctgaattctttttgtttgttttgttttggtttggttgagacagggtttctctgtagctttggaggctgtcctggaactagctcctgtagaccaggctggtctctaactcacagagatccacctgtctctgcctcctgagtgctgggactaaagatgtgagccaccaacgcccggcctcagtcctgaattcttaatgtgctgtgaaaacctcaactgagcattttcttcatcaaagcgcccttcgcctggttcgatgtcatcacaaggtaggacatttctgggagatgtttccctgtggaggacattagaaggtagaaggcaagacgacagagacctctgtgtccctgtctcaaacctgcagcccgtgcccatgccctgcatgctcgagtgagccctcatcccatgcctgacctttggaatcaacttcttcgtgggaaagcaacctgtgcctccactgagcacaagtgcacagggctattttgagccaccactctctggaatcatgacagcctgacttgtggaattggaagtaggtcaccaactaatctcttccaagtgacaaaaaaaaaaaatgcatctgcagaacccatgaagacaagagggcagcccgtctttaccttttgctaacccacccacactcccctggaaactggagacacagcagaggttggctacgtacatcagctacgatctggctgcgtgtgtgtgtgtgtgtgtgtgtgtgtgtgtgtgtgtgtgtgtgtgtgtatatatacacacacacacacaaagtgataaaatgaccaagtcctctatttcttttactggcattgtcatagctgttgatggttgtcatagaaaccagcagaggtgtcctggctcctctctcccagccagaagaagacctgaagttattctgatctgagacttttaaaaatagaaactgccttaagctaggtaaacagtctcagagttctgtctgctttgaaaatatttggccacatggttctttatttataatttgtcataaatcttaattaaaaaatagaaaaagtgtttgggggctggggaaatggctcagtgagtacagtatttgctttgcaagcacaaggacctgaatttgttcctcagaacctatgtttaaaatcctgtattgtcacatgcttttgtaatcccagcactggggaggcagagacaggcacatccacagtgctcactggtcagccaacctagatttggtgggtcttaggccagagagagaccctcattcaaaagataagtatattgctcctgagtaacaacagcttaggttgtcttctggcttccacatatgtgcacacacacaaacacatgtgcatacacacggaaaaaatataaaaaaatatttttgtttcttttcagttacccagaatgtaataattcaccaagaactggttttagccaggtgtggtagtgacatgcttacaattgggagacagaagcaggaagatcataaattcaaggcctaccttgcctacggagggagtttgaaaatggtctggattatcatgccactcatctaaaataaaaataaaaaagaaaaaccaattggttctagtggcatccattaaatggcacattaggtcccttcagttgctacaggcaaaagcctaaatcagtctgagttagagatggactcactggcttctctggggaaaaaggactgacactgaccagaaatccttagggggtttctatagtgtggatctcgaatattcccagaggcttatgtgttaaaattttggtccccagctttgaggtcctaggcaatgtaataataacaaaacccacaagaactggggcttagcaagaggtctgcatggggagtgtgcacttgaaaggaattgtgggaaggctggccaggggtgggatcagcaggtgaagcccagtgaccagagtttaaccttagaacctacgatgaaaggaacaactcctgaaagttgtctttctctggctgtgagggtgtgctgtgcccatgctcacacagacacacagataaagtacacgtttggaaagaaagaaagggaaggataagggaaaggaaggaaaggggaggggagggaaggggaagggagaggacaggagggaaggggaaaggaagggaggctggaatgaaaagatgggtggtgggaacccaccctttcctctttgatttttctcatatttggccctgaggtaaagaggcctctgctgcgatgtgctcccaccaggatctactgttccatccccaagctccagcaaactgatcgtaaattgaacctcagaataatgagccaagtgctgaagagatggctcagaggttaagagcacaggctgctcttccagcggtcttgagatggctcacaaccacctataataggatctgatgccctcttctggtctgcagacaggcagaatactgtgtacataataaaataaaccttttttttttttttaagaaactaggaaaactgcatgcattaataaaaaaaaaatcacgagccaaaaaaaaccctttcttctttccaagacgatttgtctcagacatttgttacaatgatggattagccgactcagcgatgacattgcagcgtctcatttccgccctaggtgtcactaggtctcagatgtcacgttcattcagggttagttaggggctggggtgggaggggttctgggtgcctcagggcagtatctttgccagccctggagcgcgctgccaggagggcagagctgcggggtgggaggagggggcggcagtcacacagagggccacatgtccccgggccagagctcatctgtcccactgagactgcccttagataaccaggtgttgtaaaggacattaaaaagaatgaattccgtctctgatgcgtttacacaagttagacaaacctgtggtttattcagggctcagatatctgtacccgccaggagaaagaaaccacgcctttgtacaaagtttaatttgaggaatcacggtgacaggggattgcagtcgtggggaaggactggctggaaaaacactgaaaatcccaaggaacacaagaaaagcaggtgtgaaagccaagccgagggttgagagcgcacaggctcccgacccgcacccggggtggaggtgcagacctgtgcagatgtgactcgctgaagcttctggaactctgctcccgaaggcgccgctcgcagctgtttgccgggcctcgtcccgaccccggaggggtgcgctgtaatcagcgctggggtgaaaggattcccgcgtgcaggctgtgctgccctgccctgtccgctctgcaggagggagctggccgcacggaaccgaccccaacacccctggttacacccgctgtctcccgtagttactaagagtgtcctggttgtctcagcaagaagcatccagctttgtgtagtcagcaggctcgcaccagcgcttgacattaagctcgccctctagcggtcagggaggttaatcacctgcatgccagccagtgaggcatccagagatgacagaggtgatcacagtcatgtcaggggtaggaggaggaagacggagggtgtgccttcggaagtggagctggagtctactccaggaaaggcctctaagagggaccgtcgtgattattaataaacgtccggaaacttctaatcagagacatagaaacctaagttcagtgcaagatgccaagtctatatatttactgaatcactaattaattcaactaacatgtgctggaatattgtaagccagtgctgagggcacacaatctgttatgtgccagaatgatgagggctcatctggtccgcgtgagacagcttcccactagtgcaacaaacacccgaggcgaattgagtttagaaggagggtttgttttggttcacagttttggggttacccatgtcgctcatggcagcatggtatatcatggtggggacatgctatttacctcaaggcattagggaaactacaagagatgaagagctggggctagggtcttaaacctccttcagaggcatacctctgctgacttaagacctcccaccaagtctgccgtctctgagtagccctggctgtcctggaactcgctctgtagaccaggctggccttgatctcagagatctgcctgcctctgccttaagagtgctaggaatgaaggcgtgtgccaccaccactgtttgaatttttttaattaagaagattattttcatttatgtgtatgaaagttttgcctgtatgtatgtatgtatgtatgtatgtatgtatgtatgtatgtgcaccacatgtatgcagtacacaaggtgggctctggatcccccagaatggggggtgagctatcatgtggaaaccagactgggccctctgaaacagccacacgtgttcctaactgctggcctggagacattcctccttttaaagattctaccacctctccagagttgaaaagagaaatcatgttttcactgtattcccataatatctgaggcatttactggctgatggagcagcgagctgcctgatgggccctgtattaatctggctttatgggaacataaagccatattcccaaagaggtaggaattttaattagactggagtcaagccaaacactccccaacagcattagtacaaagggctggaaggatgaaatggggttaggatatgttgcccatgtggcccagaggacaggccatgcctgtaaacaaagccatactttcgatggtgtccactctcctcaggcagcagacaaggctctggagttggcttgccaatggcttgttaaaggctaattccaggacactcaacttgtgcccagttttagagcccagccattggctctcaggggtcagcgaaagcctatccagggcaactcacaaacttgggaaagatggcagccattaaatggcttgtcagtaattctgttggcaatttattagggattgtgaaaatataactgcagggctaagaaacattgctggggagaaaaagatattcctccaccccatggctggcttcccattgccttaacggtcatttcaaaagtgtagttgttgtacacctcccagcctggggtggaactttccaaatagtgttgggccatggttcagattggaaagtctttggatttatgagtcaagagccactgtctccaaaaggcacagaatggatgccaggtctccctccagagctcttaaggcatgaattctgaccagcctgtttgtccttgttgaagtaagaaccctttttctttttcattttaccacagcatttcacagaagaactgaaaatatcatggagaacaaaaatagcacgagacggggcctagaaccgggaagaggaggcacgtggttcctaaatcgctgcacatgggcactgtgtggcacactgccacttctggaaatgtgagccagccatctcagaggtcatagcgtggccgaggtggcatgtttcccaagagagctgcctctgggcagttggggaaggcaaagcctattcaaggctgtttagaatgggagctgttagtcatctggaatttttgtttttctagtttcaacgttttccatttttgtttccatttatcgatggcttaaatgtttatgccctaccaggccataaccagcaaaagaaagaaaaccactcatgtgtactcattcacaagcatggttctaaaatcctgccgtctcccaggcttttccttcaactgtatgtatgtatgtatgcatgcatatatgtatataatttattattactcatgtgcattgatgttttgcttacagatatgtctgtgtgaaggtatcagatcccatggagatgccatgtgggtgctgggaattgaaactgggtcctctggaagagcagccagtgtcttagcctctgagccatctctccagcgccttccttcaactcttcttttgacaagttcagggacctttgtggatgagtaggcaaatgacagggactgtacccctcattaggatctgctgagaggagcaggcagcgagacggctcagtggataaaagtccttgccaccaaaactgaaactgagttttgtctcagggacacacatggtggagggagcaaaccaagttctgaaatacattctctgacctccatatgcaaaccacatctaaatacaagcacgcacactggaacacacacacacacacacacacacacacacacacacacacacacacacacaccagtgaataaatgcaataaaaattaacaaagcaaagcaaatcaacaagcccttgctttaacttcccatggtgctcaaggagctccaggaaggggatctcccaggtcatagcttgttctggttaggagacctgtgtcaccagaggctgtggctctgtagtgaccccattacctggtcctgtcccttcttttcccactcttttgccaattcatcactgtgaagaagagaagaggccaactgggacttagctagcactaatgtacttctctttatgagtaatgattttaaacccacgatgggattagtctctgacaaagagttcagggaagagcaagtctcttatcaagagggactttgtttttcccagtgaaaatacaagggcatgaggaataggtgggataggaggcatacccagcacccttgttcactgcaaataattgagtgttggacccagatgcagccagaatgccaacaaaaagacctgggagctgtaacacatggctctctatggcccatctcacagacagctgatgttgcctgaaaactaggagcatgtcacacaggcctgtgtccagagacacaggacactgggggggggggggacaggggacgggggacgaacacgggacacatttgccaggttttttttttttttttttttaaatttcaggtacatactgtgtgtgtgtgtgtgtgtgtgtgtgtctgtgtgtgtgtgtgtgtgtgtgtgtgtgtgtgtgtctgtgtgtgtgtatacatgtaggctgaagataatctcagaggtcatgcctcaggaggtgacttgtcagactccatggtacctttactctctttggcctgactatattcttggtaataggcagggagtccttggccttgggcaaggtaagaggctaagcacagggtctcccacagtgctgtaatctcagcttcctggggctatttcaatttcacaaccagaagtgagaaatcttccacttttctgttgcttctgatcttaaataggtcagggacagtccttggatcacagctttgttctggacacaaacagagccaactggacagtgtttgtactgcccagcatctgtataataacgtgattctaaagaggcaggcaatgtttacacaagaaactgctgagcagtttggcttcagtttacagggaacaacagactctttctcaggggactgtgtgtaaggagcacaggcagtcaccttgctctagccttctgtaattagaatgctgtttggttacaccttggtgaccctttactttttttttttttttttttttttttttattgtgtaggagatggaatgatggcttagcagttaaaagtactggctgttcctctagaaggtccaggttcaattcccagcacccacatggatctgacgccctcttccggcctgtcctgacatgcagtaggaactgtatgcattgatgcacagacatacagacaaaacactcacacgcataaaataaataaatttcaagaaagactgaaaaaaaccatgtttatcatttatgtgtgcacatgacaggacccgcacatggaggtcggtggggtcctctcacatttcaggactgaactcgggttaccaggcttgtgtggccagcaccttcaccatctttgtgatcttcgagggaagaccttggggatgtctgccctgacagctctgctgtccctggttcctttggctccatcctgccactgcccggcacctgctccttctgttgccagagctagaccaagagcctgtaagttgggctcacgtggtcagattccctttgtgatacacctttctaaacccatcttcacccaggtcaccaggctccctagtatgtaagcccaaggacttcatcaccccaaggcaccctcccatctaaccaactgtagctagggttgcaggattagtttacacaaagccccaagctttccagagaagggactatttgctgctggctcttggaggtggcccatgggcacagtagaggatttgaaaatgtatggatcagttttcagcttctagttctcacctccaagtggctttagaaaattcccatcccatactccaccttcacccagcaaatgaagccgcccaagttgtttcttctcagcgaaggaaagcagattacattagatggtcagagaatcgagagggtttaaactctaaagtggtggtagaaatcctatagagatcatttgctattgagattccagcccgaggctgcttcctttcttcaggatttatgctataccaaactagcttataccagacagcctcttctctgtggctggtgagactgctattcctaggccaattttcatttaagcaataacacatccaaaggcgggagcaagcaagcaagcaagcaagcaagcaagcaagcagagcagagcacacaattccctggaaagctgagacaggaggattctgagtttggggccagtctgcattacaacgcattccaagccattcagaaataagtagagaaattattttacaagaaaggaaaaggattaccttcttgcatagccccttgtggacctattctagccttggaagcccagggtgtttttcttgcttggtttatagattgtcaaccccaggtcaagcacttggaaagtgagagccagcactttggctccatcattctcatggtgatcggatgatgtaagcacttcggctgcttaagtgcacatctccttcctgacctttgatccaaatcaattaagcaatgaaatgatgaaacctcacttttgatcaataccttccgtccagagggacactgtgttgtccttacagactattattagattggggtttggaatgggaactgctgcctcatgtaaaattaaaaccaaaaaccaaaaaccaaacaaaaaaaaaatcaaaaacttaaaaacacctcagggtctctattgtaacccatgctagcccagttttgccatcctcttgcctcagcctcctgagagctaagtcaacggctcagtattcaaggaggaactagggggatctataaacattaaacagagtcaggactggggtgggacatttggaactaatgagtttattgaacatcctgttagcagctagtgggtatccaggtcttgcacatttgaggtatttggaagacaccaaagcttttggtttttctaattaagccacagtggtggaacagagtaagtcacctgaaggacagtagaaatttccttggctcacctgtcctcataacccttcagggaccctactactcttcttagtcttcatttaatctgagttctagtcacaaaaggatgctcagtgcttttctacacccagtgagttgaccatcattccgcctctgttctaccaccggtacactgaattccttatgctgaaccaactaacgttgtgctgtccatctgtgcacattctaagtgtgcagtgggagctcaccgatttgcattttcttggtgactaatgacactcagcatcttttcgtgtactcattggccattcatacattctctcttatgaaggtactttgaagctgtcataatcctgagttatatgagcctttttacatattctaaatttataaggtctttgacagattcattgtgaggcccttgctgccaagcctgatgacctgagtttgatcccaggactcacatggtggaaggaaaggactctcaaaacttgtcctctggactccatatacaccagcagggatgtattgcccagcccacaaaatgtcaaaaaatattgtattttcttccatttgagtacttgcgtctaattttcctaaccacattatatgaaaagcacactcaaaaagtccaatgacgagtttcccttttatagtttgcacactctgtgctccagggaatatctttttatgtgaaagtgacaatgctgatcctgacttctagttgccctgtagttttagttttagacttaaaacttattcacttcagattttagttgtttgttaattttccctaattgtacttgcaattctgccagcattattgttgaatgggttcctctttcctgaccaagttggccaggctcccttgtggattacttgaacatggctctttgtataggtctccctggataccagttcgataactgtaggatgaagccttgaaaacaggagcaagggccctccaactctgttctgacaattccactatcttctaggtcattttcatctcacacattttaaatggtcaatttctaaaaactgctgcaattttgatctgaactgagtctgtcacatccatggtagtcctggggtgttgtcaccttcaggaacacagtccaccttctttgagactgagtctctggttggtctggaactcaccaattaggctgcttggccaggagacctcgggattctcctatctccgcttccctagagctgggattacaagagcacattaaaaaaaaaaaaaaaaattttgttttaattttatgtgctttgttgttttttgcctacatgtatgtctttgagggagttcgattccctggaactggagtttagatagttgtgagttgtcacgtgggtgctgggaattgaacccgggtcctctggaagagcagccagtgctcttaaccactgagccatctctccagcccataagcgcgtatttttgttggttctggagatcaaactgagctctttgtacttgccaggcaagcgctttatcagctgagctctccctgcctctggaaccttctcccatcagttattttctacaaaagattttggtgtctaagttcactaatgtccttagtttcctgtctttgatcttgttttgctaccagagtgatactggtgtcgtaaaaagcaccagcagcactctttttaaacgagcattgtgtgggatgggcatttttttcttaaatgattgacaggttgactggcaacagcctctggcactggttttccttgtgaggtggtttttaattcagggccagtaagacttttttcttttgtgacactgagtattgagcccagggtctcatccccaagaggtaaacactctacttctgagctacgcccagccctggagcttcagttttgaacagaaagtttttgctgtgcttattttcgctgctggaagcctgcctgctacgaactccagaagtgctcacggcaggtgcgaagcagtaacggctggctagtaaacaccagacctttggctggcagtaaagattgctgttgactttcctgtcagctgctgtgcatttcccttattcctaacagtttatgacacatgacaggaaaaaatgaactggagttcccatctccctaggtagccccttgttaatctagtttctagtcttcagttccttttttgcaaattacattccccatacctgacacaagttctttaagctgggtgggcctctttcatagtgctgacactgcaggcaactggatgtgtgtcagggtacagagggcagccaacaccactgtacaaagttctgcacacatctccaggtcaggaattcccataaatcagtctgttgaaattctgtgggggtcaaaatgaagagatcttccctttgatattggaataaatgtctcagccagaaatcttcctttagctgcagtgctttcccccagggcctgtacctttcccctctgcaactcttggggtcacctggcagctttgccatgggttggcaaggcgtgtcatggctatgtgcctctgagtccattccagagaagacagaggcaacagcttgcacagccatcggcaacatcacattcctcatagtagggcagcaattcctgagacgttttaaatcctgtgtacactttttaagaggttattttaaactttctgaagtgattatgtacatattttcttgtacacactttctgaagatttagaggggactgcgtgttgtctagtgtttacactgtgtgcagcccaacgcagacagtcaggacagggctctgtgcttctgctcttcccttacacagtggccacaaaggttttgagaccaactctctcttgatatcaggcctgtgggcctgccctccttccacaagagtccaaggtttgcatctgagcagatatctccgtatctccctgtgtgcagtcgtgtatgtagcataactagcacacaggggagccacacaggccctgaagcctttgtggatcagtggtcagccaaggcacctctgctttcagttttgtattcatctctgtgtcgggagtaggaaggggggctgcccgttcttcaactggcttccagggtagtcatgctgctcaaaattgtttgccagctgctacagggctgaccacactgagctttcttctgctgttaaaagtcaggacctactgggcccttgttgacacacatcagcacctatgaagccctacgtggtctggcttcagtgctgttaagctgtggtagcttgtccccaagagctgtgctgttcatctgtgattgtgagcacagtaggcctctgctgtgatccagaggagagcaaggtctgcagcatgggtcacgcatctaaaaagcaagtgttgacatgtctagaagcaagctgctaccagactgatctagaacacatggagttatcacataaattcctaatgtttcatattagtatcttaaaatttgttaattgttaatgaaggccttattactatttttcagattctttcaataaataaacttgtttaaaaaacaaaaagaagcagaaagtgtggtggctagtctaggtatggaatgaataaatgttaaagttctacaaacaccacataaagaccaagttcagatcaacggtgcccacagaaatgagagcattacccagggctactgctagcagcaggttgaaagcccagcctcttgaaggaggtcagtggagggaacaagagtgtaccaggaaatgaagacgcttaaaaggcttaccaacatgtatgcaaatgtcacatgaaatccattatgcataattaataatatgcatattattatgcttgttaatataaaaataataaagaaattatcttttataataaagatattaaataaaataataaagaaaagtaaaaacctgtctgtggatggggaccacaaaggccagtgtaaagacaggaggtcagcagccagaggacttctttgtcctccatgttccttctgctcaactcctcctggtccttcatcctgttcccctcaggccatgttgccctgtctttcagaagacccaaatcacttctgctcttgcaaaataagtttgaccttctgacttcagatcctcaccacatctcacaccccaattcacatctggataaaataagacttcagacttgatgttcaagtctaaaaggatgcacttgagggcagagtttggcagagacaggcagatgcatgaggtattttagaagctgagaagccgttatcacagacttagtaagacatcctcacaatagataagatggctcagtgtggaaaggtgctgaccgtcaactggatggcctgactatcaacctctggaccctgatgacggaaggagagcgtgactcctggaagtgtacagtgtggtactcatggactcttcccaaaataaatatgtaaatgcaattaaaaaaaagacttccccaaaatagatggcatctccttcaggggctggatcaactcttgacattatattttgttttcaagcagttcctttaacaccaagggttcaaataaatcctctgagacattttgttggtatagattttaaattacaagcttgatttgacaccctcagacacagttcttaagaaggctagttataaatagttgtcattacttccgaatgagaggagaaatacatttcagtatgctggatgaattctttatgcgtggggtaactaacatcctctcatctccaggtgggacactccaattcatgcagtaaatggctattacattttaaaatgagtcctgggttttctaggtgagagttcatgcccactttaagtcaagaggtcagcctactcctgatcactctgtggcccctgaagtggtgagcaccgggttcctctgacacaccctgggcccctggttagtgaggtgtcagtttaggcctttccttctctgaaggctcccaggaaacctcaggtttcaaaaaagtggctgagaggcgaatatgacaccagagatcacacaagactctgagtgacccaagagaggtaaacggtgaagattttaactttttttgatgtaaaatcggcagaaacgggggtcaccaaatcccagcagctagaaatcacgaaaatggaacatgtctgtgtatcatgaggaggcccacataggcaacctcactagcgccttccacagagcctctggcagaagtaccctgatgatgggacccattttacacaggatgtgaatacaaggtcttcaaatttataatagggcattaaaataatcttctaataaaatcagccttaggcataaggaatctaaatttcagtattctgtatacttctaaataaataactctgatctataaccattgaaaatattacaatttacggtgacatggtaagagataagccacacagtgttgtaagtaaaaataaaaatgtcaatttaaaaataagcctaaaacatatggagctgaaatagtacaaaatcaaaacactaagtatctaattaaataggtagcggtgggatgaccaaatacatgctcagcaacgcactctcaactcatacaaaagcccttaaattcacaagttccaaataaataagcagaaacacaaagaaaggtactgtgccagccagtaacaactacaaagcaatttctcccatttccttccaaatgattctaacaggaaaagaggaacataaagatcacttgctaaaaaactataattcatgatttttaaaaaaagacattgcctagaatataaaaagtcaaatgaggcttcctaaacattagatcactgtaccgtaaataaggaaaggccacctaatgacagatttaagcaaaacaaggtatttaaacttgtctacttaaggtatgattgaatatctgcttcctgaccccatgactgggtccacagtgatccatgataggaacacatagtccacacccctgagggtatagcctgcgactactcagtctcatgaggtggcctgtttcattcaacaaagtaagggttcaccttccacgagcacccatacagtaggaactaccccttacttgggttcctaggcttaggttccagaatggaacgggtgcttgtcaagcttcccttgagcagtggaacaagaactcagtgctccagacagcacagaagccacagggaaatctcatctgagacttgggagttctgtcatggtgcctgccttcaggcctgtcaaattcattgcctcagatctgtcagtctctcaattcaaggccaacattcctacagtttatctagttcacaggtaagccttctccagagatttgtgcctgcacattgtagtcaaattaaaagaataaaggtcatcttttactctatactggatatccacttgtggttactgcttcagacataacacgcacccacacaaccatttcacaaatggagaacagaatctagaataatgtccaaagctaaaattacacagctcccaagattaactaaaaaacggtgttgaaaccataaggtaactttctctgtttacaaagaaacttattgcgtgatggcgggaagcgatgcctatggacaatgactgtaaactgggactgtcctttaaccctcagtgggagcccggtgtgactctgctcagtgtgcttcactacacaagcaagcagcaaggagaggggcgtggtctccacggctccctcctgctgtcctcagcgcctacgcaagtattcgccttctgtggattactctaacagaggtctctgggcagtttctattgcccgtccttgggtctccgctgctggggagggggaatgttccgtgactcctttgcatcactgtctgtctgtcagcacgcctgtcccaatcgctgctaggagaggtagacccagtgtttaagtcctgccacgccctgcagtagcttagtgtaatagaagtccacgttgtccgcaaagtctgtacacacaggagactgcatgtcgcccacagtgcagtagagtgcagttcctccaacactgaggaagacagtggctacgcacagcaggatgagcaggatgcaggagccgctgcccacttcatctgcaaacacgaggacagcggtcagatatcacacagcaccatcggttcagcctcctcacctgctcttcctttagttgcaattctcttcgcctgttcgtctatgctagcaacctagtttatggatctccacatttcttcataccgttaatagtcaaccctccatatctgtgggccaaatattctgaagaattttcctgtactaagtatgtactcttttcttaatgcattcccttaaacaatactgtgtaacaattacttaccaattatttaaactcatgagacagcgtatgtaatgcggatgatttcaactgctgagcaaactctctgacccaagacactctttaacaaagaatgagtagctgggcgtggtggtgcactcaggaggcagaggcaggtggatttctgtgagtttgaggccagcctagtctacagagtgagttccaggacagccagcgctgttacatagagaaactctacctcaaaaaagagaaaagcaaaaaccaaaaagaataaacaaagtatgccggaaggattggtgagatggctcagctggtacaggcacttggctctgcaagcctgacagcctgagttcaatccctgtaattaattagtggtggaagaagagaaccaactcccatgagttgtcttctgacctccacacatacactgtggtacaggtgtgtgtgaaataaatagtaataataataattatcatcattatcatccaagtacacagggggtgtgaacagactctaggaaaacagtattctgtctcatataagggtcttgggcatctgcagattttattattatggagtcttgggtcctgtggtacatggagagatgacattttaataccatttaggtgtttgaaagtatctattttgcttaaataaaatacattattagctgtggtgggaacaagccttgagttgctgctgagtatcggacaagtgactgatacaaaaaaagatgccaggtgagctcgaaacagatcccagcttcggaggatggagtgtggaaacgatatgaaatgtctcatcagcaattttaccacactgatcaatcacgttgcaatatttttgatacactaagttaaatgcgatatactactaaggcacatttcgtgtattttcatgtttgttatatggctgtcataaaatttaaaatcacccatgaggggctggagagatgacttggtgtttaagagcactattgctcttccagaagacccaggtttgaatcccaggcaccacgtgatggctctcaaccctctgtgacttcagttcgggggctctgatgcccgactctagcttcctcaggcactgcacgcacgtggtacacagacatacatgaggcgaaacacccaagcacatacaaaaagggaaccacctgtgagcgtccacattacatttccaggacacagtaccgcctagcgggagtacgggcctcttagggagctcaggcaggaggtgaggtttgtacctatgcacgtgtaagctttacacaaaggtttcatatgactgtcgagaccaatccatgcactttaactacaagcttttcattgtccttggtggcagagcagtgcttgttactttacattttaaggagaatgaagcagagtaacctggtggcggtgaggtggcctgagagttccagaccctggtgcacatgtgtgtggtcaggactgaggacttctcgggatggggttggggtgtggaggtggagctggctatgagatgccagatgaaaaaatagcatttccaaggcctttcactctcacagttgaaagccccaggcagctttcccactgtcttagaaacacagctcagtgttcacacggttcctcagtgaacagagaaacacactggcaggctctgagctggtgtccacttctcttacacacttctgcctcaggtgactctatctgcaactgcacaaggcagctctgctgtgacagcatggcctcagtgctgtccagggacagatgctcaaacaccactctagggaggcactcagcttccatgcagagtagacaatgcttcacggtaacagagggcattaatttgtcattaaagacgaaataaaaagaggggcattaatttgccacttaaaacaaaaacgaaaacaagctcactacaaaggaagaaaaggaaggaaaatactaaagaaaaaaaaaaaactgaggtgagtttttgactttggccatttgcaactagctcatttgtttcagcaaaaaatgcttcaaagattaaaaagatataacttgatttctttttgtttctctgctagaaggtagagcgagtccacacagtccttacaaaccctgctagcaggcatcctgtcacactgactatccagcagcacccactgatggtgacccctgcagacccggggctgagcgcaccttgatccaggctatcatctatttcctggaatcgcactctccgcttagctggcttctgctgcatttgggcagggtggtcccctattgtgtcattcctcttctttaatatggacaccagcccttctgcgggaacggcctgtcggagatggaagaaccattgttacattaagttgaatgggacttaggggtgatatgtcacacattcgaccacggaacaccatttcagtgatttgtaccccatcatcccacccccccacacccccgtgctctgtgtgtgtgtgtgtatgtgatagggtcttacccaggctagtgttgaatctgtggcaatttttctgccttagcaggaatgccgaagtacatgcatgagctatgacgtctggctcagtgacagtatttaagacataaagacacaaggcctaaaatatatggggtggcaaacttaacaccaaatgagttactttagttcctcggagaaaatacacattagtaaataatttgtattcaaaaatcttttggggacttttcttctagattttctctcagtttcctgtgactcactacttggtatgcagaggttaggaaactctttagccagaagcccctgcccccccccccccgccctagataaggctctccttcactttatagctcaggacagctcagaacttgctatagcccaggctggccttgaactcgaaatcttttctgagcttcccgagtgctatcactcctggctttacttcattccttgtttctgtaaatttaattggaaacagagcaaattctgcatttggggtgggggtggtggtggtggttaaaacaaaactgggaagccgtgacagaccataagcctaaagtatttacagtttggggcttcatgggaaaactctatccggttccttcagcccctgctatccatgttatgcagcccttctgtttctctccttcctacaccccatctctaatttcaagccaaaagcacttgcttgccatttaggtgtgaaagcttctagagtacaaatgaaggttgtggggagaagagggttggtcagtttgaagaggcaggagggagagcagctgctcactctgcctatcccagccaactgggaggaggtgcttgcttgcttcatgctacagatgatgacatggttgggcattgtgggctcaacactgtggatggatgtcagtggctgtaagctaggattgcctgtaatgtcatttatctgatcaatggcataaagtacttaatatgatttccagttctaggcagcaatctaagataattacatattccattagttctttttataattcagagctattaggagcaactgagtctagacaaatagtcttctactggggttctctgaacatgggtctatagaaaccattatcttaaaaaaaaaatcaataggtcagcaatttattctttttataggaactacctatttcagatatccttattctcagaaagctaaagtaatttagtgacattaaaattcaaagtacagggctgacaagatggctcggtgggtaagagtgcttgccaccaagcctgaagatgtacttgagtttgatccttggaactcacatagtggaaagagagaaccgactctctcacgctgtcctctggccttcacacacatgctgtggcacaagcatgcccctctcgacacataaatatttttttacaagtacaaacgtgtagaaatagattatattttttctttagaaaacattaaagaattccttcataaaataatggaaaatgattttacagatgccttgcttaaagtgagagacaaagacatacagttaggtttttaatgagcaaggactagagccagtgagacggctaagcaggtatgggcacttgctgtgcgagcctcacaacccgagtttgattcctggatcccacccctggaggagagaatggactttcagaaggtgtgctctgacttaggcatgccctgtggcatgtgtatgtccgaactcacacggacaaagtaagtaaatcagtttcaaaacaacttaaaaagcaggggttagagaatagaaattagttttaatgaactatataactggcaatctttttatctctagaaactgtaaaactaaaggggagaagcctcatggaacgtttgttatttttttccaatgtttccaatgtagctgaaaaacagcaaggtgcaggtccagtaagagactttccagaaaagtgaaggccgacatctgacagagggatagaaggtgcctaacatcctgttccggcacgcacacacaagggccagtgagaagggtgagcccaggggctgcagtcctgtgaagtgtgtctttgggatattaattttgcatttgtaaattcaagaaacaaactataatcaaatgacgttggagagaagtcccctagaatggcacagctgggctcagggctgcagtggtcagcacctagcttacttctaggagagtctggctctcaaggccgtcaagggacgcaagccttactgacaaggaggacagaggcagggcctgggagcacaatggcacaggatggatttggagcctgctttgactgccctgccccccacgctttatccctgggctgggaatcaggccttcccctccttcccatcccctactgtcagaagtggaggaggatgctgggatgctcttccgtggtaggttctctcagtctctgtttgggaatcttctctagtgttttctttcttttgtgcatattttcaggttcctccagcacatacacagggaacaaagcacaatgggtctgggcacagagaagatgacagccgaggagggtaaatcttggatgcaggaggtataatgctttagatgtccccccccctctctctctctctctctctctctctctctctctctctctctctctctctctctctgtacttgcctgaaacagaattcctactccccacaacacggcagccaaaatcagacctaccccaccccagacttcctgcctcatacgggtcccctaccctcactcagaattcctatataccacagcatcaagagtttaagaacttaggtgggtagaacttgccttaattccatggctgatgtgtaagcaatcggaaataacagcatggccttgttcatggtgtcaccctaatgagccaaatctgtctacgcagtctctctgtatacagtcactatatacaatgcctttcttgaaagttactcctcaggaggtggaggcaggcagatctctgtgagttcaagaccagcctggtctacaagagcaagttccaggacagcctccaaagacacagagaaaccctgtctcgaaaaaccgaacaaacaaaaaaaccaaaagaaaagaaagaaaaaaggaaaactactccaagaaagtcatgtggtgcacaggcctttgatcccagcgcttgagatctctgtgagttcaaggccagctggtctacacagtgagtgccaggacttaaagtactcaaggcagggagggctggtgtggatggctcatgcaggccttgcccttctccccgtcccctctgccttgccacaaaccattagatcacattcctaaagccagccaccgaggtctggtcccttatttgtccacttcttcctcctgactaccaaggtcagtatcaaagtattgaagtccagcaatcaaaagtcccctttggctgccctaattaacatgcccaatgaaaatgaaacacctcatcctaaggtggagtttccccttttacctttataaactgccatgtgcctaaggaccacatctgtctcctctttatccaggagatcctttgtccttacaggacaaataccactgcctccttctcctcataccccgtctccttcaccaccacacccagcccattctagcacacagcatacacacgccttttctcttcctaaaacttacacctgccagagtcagaaagcagccacttttttcttcctcacttaataaaggatctctgtgaatatattgggtatttgggtgtggtttgtgcttaatggggggtggggggtgaggcctggtgtctgggagggagttcctgctgtgcaggggtggggggtgtctgccttcaaggacagccagggctacatattgatagagtctcaaaaaaaaaaaaaaaagtataagatatgaagtatttcagtctgtgctcctgaaggactttagaattaacaaagaaataactaagaagaaaaacaatcctctcaccctaagaacactccttcccttcttccttctctctttcccttcctccctccttcctctctccctcccttccttcaagatgctaggatcaggacaagggccttctctatgctaaaaaaaaataaaataaaaaaataaaaacaaagacaatttaaatctccaaaagagcttcatctgtaagaataaatttaatttcctgtttcaattagcaaattgccttctcaccccaacaatatataccagcctgtcctctagaacatctgagccataattactgtaattgtggccctctgatagatgcagggctggaaaacatccatcttgcctagtcctgtgcatctacaaggcagtggatcagcaacgatagctgccttaaacagcaagtcagagtacacgaaacaaaatgattccatgagccccgaaactgccattcccaacacgagagacgggcagagcacactgtggccaccagtccctcctcaccagattgtggaggaaatgagccaaaattagaccattttcatctggaacctcaaggcttgtcattttaaacaagaacacaggcttggcttccaactaacttggcaatgaacacccacaagctacattagtgtattatgtgtatcttgttttgtttgtttttttgaggcagggtttctttgtgtagccctggctgtcctggaacttacagagatccgctgggattaaaggtgagtgctgccctgtctggttttattgtgggtatcttaaatggatgaacattaacagccaattccacgctacgccatgttcagccctcacaacggtttcaggaattatcagatgacaaagccaatgtgaatgagctcaccctgcctggcaatgggcagagttgagacaaactcagggttaaaaactaagatctgatctgtcctattaggattttactttgtgctgtatgtgtttgttactattggagtgaaataaatgggattttcaaataacaaggcgtttggctacccagaagttgtttatattttctacctgaaattctaatcttttatattccccagttaagagatacttaaactgacggctgttcttgtcatggaggaggagtggaatctggaagatcttcggtaggagcagattaatgtcatggctactgtcacagctaattgatagaacaggtcacagctgggcctgggggtgacagctaatgcgggaaagccattacacagaagagcctgtggcttcctaaggcctcccaagtgctaagtctaggagcacggcaacaggatgtgccaagtgggaaaacagacggaggggggcggggtaacacaccatgttggatttctgaccgcttaggaaggaaaaaagcatattgctaacagcaaagccaggagcttcctaaagcatctaaatatgtagatcaggtgccgctgcaagctcttgctgctataattcgctcttgcttgcaaaacagtcagtcagtaagcacaagacaggaaaggaaacgtgagcttgctaggccgagtcctgcctgccttttgcatctccagaagactatctgtagagctgccactttcagtatttacaaaccctcgccctgtgcaatgatttaacagattttaacattgcattttacgttatttactgtgtgtgtgtgtgtgtgtgtgtgtgtgtgtgtgtgtgtgtgtgtggttaatgcatgccacagcacacatggaggtcagaggacagcttgagaaaatcggttctcccttcccactgtgtgggctggctagatggagttatgaggcgtggcggcagctgcctttaccagcagagcatcttgctggatcctttactaatatctgaagctacactgtttattcgtatgtgtatttggttacaataatctttccatctagaaagcaagcttcatgaggacagaggcttgatctctgtttactgctgtgcccgggtctctatcaagtaggaggtgccttataaacacactggagagaaaatgaatacacccagcacacagaggctaggcagagacacagagatgcagccaacggcgtctttatctttcaggttctagtagtttggtagaagaaagaatgcctgtgtcctattgtaactaaggaagatcacagctggacaggaccctaggaggaatgccgatccaagggaatagtgagtcgggcactgtgctgggcactttgcatgctgaggggcgtggtctggatgctgaggcttgggaagaaggtggtggctcatcactgtagagcgacacagaaagcacaggcggcaaggggaccagtgtgactgcagcagaaaacacaggacagtaggagacgatgctcaaaagcggctgggccagacaaccaagaatctgaattttgggctacatagcaaagccttttcccatgaagctacagggtgccctgggaagaggctggtggcacagagatattgcagggcagaagtttaagtcaacaggccaagtgttagagagctggactctgtctttgacttcaaagcataatgttttctttcttttctgtttcttccttctgtcttttctttttcttccaggcaaggtctcactatgtagctccaaatgtccttgaacttgcagagatctgcctgcctccactttccactatgcccaggcctactaaaggttttgtattgtattgaaatttattttttagtgctttgcctgcatgtatgtatatgcactatgtgtgcccagtatctgaggagttcagaggaggggatggatgccctagaactagagatagagatgtttttaagcctccatgtgggtgctaaaaaccaaacctggttcttggaagaacaacggcttttaaccactgagccacttctctagccacaagtagagagttttaaaaagatgaaaacttctagacaggtatgagaacgtcctacagtcaagtcatttcactcatttttatggcccgactggcctttttgggtatgagcttgagactccaggtctacacagagcttatgtgagatcactggggtgggggagggataaaacaaggagaagaaactcaggaagtagctgatgcaaatgtccaggagcagcagcaaatatggaaatttgaaattaattaaaacaggaaaggaacttggtaaaagaaacatgtcaatcaagatttgttaactaaccagaaatgtaaaaagcagtctgaaaacaagaggcagaaatgacgccatctggcacaatttaaaaatggacaaccccaggttttccttggggactagttagagagcaacacaaatcaggggtcaaccattcccacccctggtgttcttggaagccaaaatgtgaccaagctatatccctgcttccctgaattcactctgagcaaaatcgccatggtggctgtttctatggctcttcttttcttttcccaagacctatggaagagtcatctgcatgactccccccaacactgctgcttaaaggaatcccacagcagctaacctttcttaaagctttaattttaaaattgtgtgtgtgtgtctgagtgtgcacccgggcacacatgcagaggtcagatcaggacaccttgagacaggatctctcactaaacttggggcttgccaatttttagctaaactggttggccagcaggttacagtaatcctcctgcctccctgcaaggcatgaccacctcctcagcacgactgactaaaggtttatccactaagacacctccccagccaacggttaatttaaaaatgtattttagttttgaggcaggaaacttacagcctgtctggtgctgggattacgggtgtgtgctaccacacgaagctttacctgtgttttcaatcactgcacctatatcactgtggaactcaatggaagtcaatcacaaaagttattaagtgttgcctgacactgcacagtactagatgtttttcttacaaaaatctgtaaataaaccaggcatggtatggaacagttataatgtcagtactgggagactgaggcaggagggctgcaaggtaaagaaaagcagcttaagttacacagggagactctgtctcaaaaaaccaaaaatctgggccagagttaggtcctcccacaagctgtcctcagctccatggtacatgtgtacccaaacccacaaacaataagtaaatgaaagcaataaaaatgaaaataaaaaaccccgaaatctatggatggagataaacatgtctaatttttttttcttaaaagagtggagacagcactgatgacaacaggtcatgtaatttttaataagaaaaagaaaacagcaatgcttcagatattaaactggcaaaaatattcctgggtttgaaaaaagcttaccaagtccagaaagcctcatttacaaatgaatctatactcaagaaccaaaatgctggagacatttttctttctttctgaggtgaactaattacttcattttataggatgaatcttagtctaaaacaacatgacaagtggctgctgatagttacaaaaccaagttctcctggagcccaaactcagtaatgcagagtgacaagagaaagcagctggcaaagagaggacgccgggtcctatgaggtaaccaagagcttcaagcagaagggaacccttagagggcagagtcctgggcagggagaggtgccaggagaagaggaaggaccaaaagtgacaggcagtatcatgtggacaggcaggtgagctgctcccagcagcaagagcagggaagccacacaatcaggttccaggctgcagtgacagtggggagcccctacaaaccaagattcttattagactacagtgccaacagagccaggcagataactctgtagaagtttgctgcaagcacaaagcaaaaactggtttaaagttacatttgtactcaagtcaaaattaaagtttagaatttaatttttaaaacttaggggctgggtgtgtgtagctcagcaagagtattacctagcatattcaagaccctgtgatctatccccaacacaaacaaaccaaaaatgtgttataattgtttaattacagtaatcccagcacttgggggggggcaggaggatcaagagtttgaggctacctcaaatgttggaagccaacttgagactgtctcaaaactgacagataaacaaataatgcatatgtgtctgtgtgtataaataattacacttataaggaaatctatgtttaacctgttcacttaacccaaagttttacttttatagtattaagaaaactctaaagtattagtgatttcttttagcttaagactcttgcagacagacagattttattaaaatgtgttcaaaacagatattggcacaagtattcagaaaggatatctaaaaacttatttactaccaccatagagcatgctgtatttgttaactgaatgttgcatagctttggagcatgtcctggaactcactctatagaccaggctggcttcaaactcatagagatccacctgcctctgcctcctgagtgctgggattaaaggtgtggccaccatcatctggtgctttaggggtttttatacagcaaaactgaacagaccaatacattttaaaaaggagaccatgatgcactaacgtctcaacgagacaactttcaactctacagacaatttcctagccacagtctcatgggaaaagagctgctgtactgtgaccaggaaaagaaaatcccatttgaccgtaacatccctagttggatgacccctgtgcagagctcgcctcggaacagactgaactctggtccagtgcttcatcatcagctctgctgtctctcaaatattttcaaagttgtgctaagatatgtaacataaaggtatcattttatccctttttatatacagttcagtgtgttatattcaaatgttgtaatccatcactgccaactaccacctaactataccatcaccttggacagatactcagtatacaccgagcaatactgaacggttctggtaagagaaaattaagacacaaaaatcatagttttgtgagaaccatttgacaatcaaatagcctggtaaaagtaaacatgggaataactactgagcttaaggctttacttaaaaatccagttttgtcaaaaaattaaaaaggaaaaccatggtttataggaaatgaactaaacagtaataggacaatggtctcaggaagcttgtccctgctccattctttaattaaattaacatataacttgttatctatttttgctttctttttctacttccttcctgaattcacctttttcaaagacaatgctgttagaatacagtgggtatacatgagaattttagggggttgagacaatgtctcactctggtttttcgagaccaggtttctctgtgtagctttggagcctatcctggcactcgctctggagaccaggctggcctggaactcacagagatccgcctgcctctgcctcccgagtgctgggattaaaggcgtgcgccaccaacgtcccaatgtctcactctgtagccaaggctggcctcaaactcacagtgtccctcctgccacagcctgcccaaggcagggtttacaggtgtgaatgagggcaacggccaacttcaagggaggaaaagaacagaaaaagcatcctcacttaaccagcaaaagtggggagtggggagtgagggggagaagagggagagggagagggagaaggggagagagagagagagagagacagagagagagagaggaagagagagagacagagagagagggagggagagggagagagggagcaaggggtccaggaggttggtgagcctgaggccccgccctagatctgcccactgtgacttctcttcccccactgtctcccttccagagggcagggcacctgctatggctttttatctttgtttttctagatttactttttgtatgtgtcttttcttcccagggcttttaaaattctcttattaaacaaaggacaataatcatctttctttgctgttatttttttctttctgtttaatagcttaaaaattcatcaagcacctcccagtatcattattttaaaaccttgactctgttaagtctgtttctaaccatttaagatgcacactaacccactgaaggagcagggagcacataccaggttttgttttctgcgggtatgaggagaaatagttccttactcaagtgtgaccaatcttgtcttcatctgagcccctaagggtgtgaaactgaactcacaaggttgaaaaggaaaaacggcgttcataactgtgcctctgtgtctagagggagacagggcagcttcctcaactgtaaacacagcaatgactgaaagccacctaattcaacatgtacaagtaacttaacaattaacatttatgttaactgaaacattcatctcaagcttaaaaccagagaaaactcatgaaaacaaagcaacagtttgcacgtgtgagaattcatcttagtctagctgttactacctccctgtcttacctcagcgatctctatcttcttggccagatcatcaagggagagcgagctctcgtcaggaggcaggctctcctggagactgtaggatgcttcttcaggagagaggtcttggaggaggtcagagtcctcgtcctggatgtcttcataggagagggactcttcggcgtcttttaagcatccttccagaaggctgttcagatagtcttctgtttccttactgacttcgtcttccttatcccgcccttcttctggggccatgcacacttctggacacagtgtccttacgtcagacgctttactgtcaccacagagtgcattctcagagccaggctccaagtcagtctgactgtgtggtgatttcccatcagtggctgggaggtgaggctgctgtgactcgtccaattcactgctctgaggctggtccctgggcagagcttcaagtacaccctgaacagggaggcagagctcttttcggtgcgtctctgaatatttaccctctgaaatcaacacaggaggtatactgtcaccactcggggagagctgcggctctgtcactgactcactaggaggagaccccttagggtcctcggccaccccggggtggtcctctgtgggaggctcctgcaagcagctgtcatcctcacaggcactctctgcagcatctggccctgacctgctcctggctgtctctggggactgggtgttggcattggtgctaaacaggggctccttccctgcagttactggaaggctgggggaagctgcctgccagtccatttgatgagagctggggctgctctcctggggctgttcttcatgctggcctcggcttggttccatgccaggacaggtttcagtctctgcagatgaagaagaagggagctgctgttgaattccaaacaatgctttgatatcgaggcagagaaggggcagaagcgtacatgtgtaacgaaaactgacgctaaccctctcggacagacgctgcctgttgtgctgcaacacaacctatgtccttaggtagaacatgcttgctaagggtttaataaatagtgttaatgcagtaaaaaataatgaagagtcttcagaagcatgttaaatgaatcgttcagtcattataagtgaaaagtttaaattctgaattttgtcttttacatttaaacaaatacacttgttttttgtttgtttggtttttttgtctactaaagctagaaaagttttttacttctacttaaggcatagcatattgagtaaatatttttagacaaccttagtaataatataaaaggtaagtagaactaaatttaatcagaatgaacaaaagtttgttcagatcaaatttgcaatttgaacatagtgtcctgaaaatgtgctttcaaagacaatttcttagttcctggaagcaaaggggacataaaaaggacacattttgacaataagtagaaacaggtttgaattttagcctttctatttctttacaacagttaaaaccttttatgtaaattacaattggaaatgcccatttgttaagagagaagccttctcatgaaggcctataattcccacaaataagagtcagaagtgcatgataaatgaataattttattgcttttcaattttaatttattggaacttcaattaccaactgacaatccacgttgagtccctaaaacagaccagacatttttaaagtactgtctcagatgcctgggaagccggaactgggctggcagcctcagctctaaatgtggaggtggcattaggagttctgggttcttccgcccccagctttaactatcagagaggaccagaaagagctggccatctctggagagtcctacatccctgctgtctcccactctcaaggtttgattgcaggagaacaggtgggcagctggttcccatgggttgtgtgctttgtccctgggcattcccttgtcagatggcagggtgtggggtgagggtcagaacaagaaaggccacagccagtcagaaaagggtcaagctcagtcataaattcccagtacccaacagttcagagagagccttcaaaacacattggtaggattcagagactcaatgagactggggagcacagaccctaggtcctgattcatcacaaggttgaggattgccacataagggagagcttgataaacaacaacgacaaaatatgacgtaggatgcaaagtgttaagaatattaatctgtgctggaaagtcttccacggtattgacagtttcctttaaaacacactattttatcaagctggggcaagattccttccttgtctaggattcagtccacactccttcatggatattagcacacgtttagattgttgaaggcagtgataatccctacagctgactcagctaaagcatgaggtattcacttggaagccagaagatccaggttctacctatgaatcggggcaccaaacaaatggctgtaaacgtgcggcttcagcttccccatctgtgccacatagaccacagcagagcaaaaacaaagccagtgctaagctgtgtctacaggatcttatacagcccaggccaagctggaactcaccgggtaaccaagaactcctgcccttcctgcctgcacctctcagttctgggattataggtgtacaccatcatgtctactgagttgtaacaaagcttattttatcctgtttctgatctagaaatgaccagaaaggaaacacaaagaacacagcatgtggggctgactcaagcaacatccctaatttgtgtggtaagagagaagggaatgaagacttcaaaatgactttacaacggaaggcactaatggatgacaccagcacatctatctgtattaccagggacaatcactcaaaactcccgtctccttttaaatcagggctcccaggcccaggatcataaggctaataatataaattgatcatataaaaatattccgaaaacacacttattcctaaaattttgcaaatacattttgaaagaagtttcccaagtcttttgattgagtcacaaagtggtataaaacacattttaaatggctaagaaacacacacacacaacacacacatacactcacacatacacaaaacacacacacacagtatatgttagtgctataaattatccatacagaacttctcattatctagatttatagaaaaggttagtacatttagtaataattgttctttttcctttttaagcaagaaaggatatttaaacacacccaagcatttcagacaatttttgtatcatctttttcatattctcttttccttattgataacacaaattattttgctttttaaaagaatttatattctattacttctagttatctaaaactggaaatacatataaaaatgtgggtttaatattttttataagtgtacatataaaaaatctaaatgcaaaaaaaaaatctaacacaaccattcagatctaatactttaaaatgccagcagtaacaggcctcccgtctcttcctctacagtataacctgcaacggacctggttctttggctgttgctcctctttcctttggctcttcagacactgtcaccctcgaaaagcattttcttcccagtgacttttccacaggtgctatctaaaaagttttcaaaagggaaaaaattaatcacaacttttttgagaaactgttgcattcaattagaaaattgcaagtgtgctgagaaaaggttttctagaatagtctgggcccaggtgtaagatgctgacatgctccccgtgaatgattccagaagaacacctcttaccttatgcttggccaacagagggctgtagaaaagaagaaaaacatagttttaaaagtacagcatgcttccaaacaaatgtcaccgaaacaaatataaaaaaaaatagagcttctctgagttctaatattagcgcaggacatttattcccagggctgaaacactgccaccagcttccgtggttcaaaggacagctccagcatgtgtgcgtttcctcaaacagccagttaccactgagagcctcagacacatcccatgtgcgtcttgcacccacacatgtcacaatttcagtttaacacagactatggcagaagataattatgttggaattacccagggatagacaagtaactttcaaacattaggttttaaagagtatcatgccaacagtatgccaataaaggcatggaagaaagaaatcccagctttaatactaccataatacttggaatcaggaaacagcttgaggccgggcggtggtggtgcacgcctttaatcccagcactcgggaggcagaggcaggtggatctctgtgagtttgagaccagcctggtctacaagagctagttccaggacagcctccaaagccacagagaaaccctgtctcgaaaaaccaaaaaaaaaaacaaaaaaaaaaaaaaaacaaacagctcaaatgtctacaaatgaaggaaatgggcaggtaaactgccccacggtcacacgataaacaggtacaacagtaacacagccaaactgacactggatgtgataaagtataacccagaaacaatggcaggctgaaggatctagaaacaataactgttttttgcatgacccatttgtatgaaatctgaggcacataaacccacagaactcagttaccatcataggggagggaagagggaaacgtggacttggtacttcaagggaggggtcttctgagaggttagaatgtttgtgtcgtggatcctgttaggagtgctagtagggaaaaatttaccaggctctcataccctgaactataaataatgagacataatctggggtccaatgatctaaagataccgtgttcatagcatgctcaagtaaatacttcaaatatttatgacacactaacaagctgtgagttccttcaggagcgtagagggaggggtctgcactgagtatattgaaagtaaataaattacctttgaaggctcctactcttttaaatgtcataaaaatggaaatacaaaatagaaagctaacgcaggaacttactaagaaaatgagttacagttcagaatccctgaagagcctgctgcacagattcaaactgccttagcacaggagacccatctttggagagctgaagggacacttccatcccagcctctatcaccttccaaggatggcctccaggatggccacccaagcaatgccctctcttctgcaattactggggactatttcattaccaacacacagagctttagtttcctgctcaatattctgaagaggagacaaagttaccaaatgaacagagagccctttatcctttgtgcaggggactcaagacagaagcctgagagatgggcactatgtaaacactgtttgttgcgctcctttccccttcagatctctgagcggtcaaatgaggaattcagaacaaagataagtagaacaaaaaataacaagctttattattaggataattttttaaaagatttcatcaaagtttaaaaacttgtcttggagaagagaatggggaggggatttgagagctgtctttgtgacagaaaaggagggggatcaagcaagaggggaaaagcctgagcaggaagaaggatgatttagttttaaaagtctatctccttgacacaaatcaggcaactggaaagtacccggtaatgaagttttccttgatttagattaaatattgcacactgtgctttttagactatacctttgacaagggttacaacttttcttatcacatacaaacaccagaaaatagcctaaacaacaataatcaacatacagaaatagatatttattaaaattaaagtaataaaataacaattaaaaaacaaacaataaaagtcctaatgtgcaacccagatcatttggcttgctgatctcttagtcaaaaaaataccaaaattatcagtgtgtctagttagaaggctccccaagcccatggaaacctagcaaggtcagcagaaaacagaaaaaaagctgagaaagacccctttacattccattatactcagttcaatttcttacgaagaaaacagaaatggatcacacacttcaatactcaatgtaatgcatatcttcaatattctcccactttaaataaattatgacatacttactcttgatgagttgtgcaaattttagcaagctgttcgaaatcttcaccattaaatcccttttctgaattcctcagaggcggcactgtatgtggctggacagctttccattttgtttctaaatttaaaacatttgttaatcactggctcttacaaaatgtatttaggctccactggaataattaatatatggttaccttctcaagcaacccaaaaagttaacacagaaagagctaaatgattatttcacagtatgtgtaaacaccattctacaaacaaaattagccaggagcgtatgcagaagaaatgacaacagagctatgaagagcagggtacaaagaaaataccgtctgccttctgcctctctcatggtgccgggggaactcacagccctgtacttgctaggcaggctctcagacactaagctgcatgggcctgtgctttgtaacagtaacttgactgtgtaacttctattcttttaacatgcaaaatcaggacagtatgctcagtttctagatagcgagttgttacattactgctaactccaagctccagtcagtctgtacttaccccactgttcttgaatggcagaaagatttgcaagcagttgctcatgatacaatcgttcaagctgaatgaatttcattgctttctcatctgaatagaatagttgaggaaaagacatcaagactgcctacatgaaaccccacgtttgcaaaggaatgtcctatagaagacaagaaatgtgcacctctgacaaaaaaacaaacaaacaaaacaaaaatgggaaggttcaaaatattttaaatttaagcacatctgacgtgaggtctcctggctttgaagtacatttttttaaatgttcttttttttttttaaaaaaattattatttattatgtatacaacattctgcttccatgtatatctgcacaccagaagagggcaccagatctcattatagatggttgtgagccaccatgtggttgctgggaattgaactcaggatctctggaagagcagtcggagctcttaacctctgagccatctctccagcccgaagtaagtacattttatcgtaacacatgatgtagagtacttgagcaaagagacacaaaaggttttactcaaggactgtccatctggcaatgcaccggcagctgtcattaaagccatctacttggaaagaggaccacaggggatcctagagtctgtgttttccttaatttccctccttaaatgactccctgactctgagacccttcaggcaattgtctctttgtgatttcatgatcctttacttactttttattggacatttttctccccaagtcaaaagtatgaaatgctaaatagtggaaacatgggatggttcttttataaaaaaaactaacttactccagtgactttcctaattatcacagaattccattttttttgatttggttgatcttcttatgaccttttagatttctatctgtaccacacaaacttgcatcttaggaggttgagaaacactgaccaaatgcccagcttcctctgggcaatgttataaatgctgacccagaaaaaaggaagagaggatcggaaggtttagctttgtgtccttcccatgaacaccaagaggttcggctctccctctctgtccccttaaggatggatccttgggaccaggaagggaccacaaatagaacaactcctctgatccctctgcccaggaccaaatgctcccttttccaaagcttacatgggatctccttgaaaacattatttagttggttgctagtgaagatttacatacagccattcatcatgagacatttctgtcagtgaggaacctttaaaaggaaaagggatccacagggatgaccccaaataagaatccaagcagtggtggggaaaatgccattgatgcccttcccctataatgagactggtgtctaccttgattaccattcctagagccttcatccagtagctgttcgaagcagaaacaggcacccacagctaagcactgaaccatacccctggaatccagttgtggagagggaggagggatgagcaaagaagtcaagacagtgctgcagaaacccacagaaacagttcacctgacctagtgagagcatggagacccaagtcataaagctggggaaacagcattggaccgaaccaagccctctgaatgtgggtggcagctaggaggccaagacagtctatgggacctctaacaatggagccagtctttatccctagagcacaaatagactttgggagcccattccctatggagggatactattgtagcccatatacagcaaggagggcctaggccctccccccgaatggtatgacagactttgaaggaccctggtggagggcctcaccatccctggggaggagttgggggatgggtgggtgggggttggtggggaacatgggaggatgggagggcaagggaatggggggatggatatgtaaatatgagtaataattaaagaatttacaaaaaaaaaaggtaaattctaattgcacgatgatgcaggagcatcttatcttggtgctccccacataacaaaagaaccggctgatgcctttctctggacatagccttgttgctgagcagcttgggaccactgctgcagtcataggtcagcggagttaccttgagcgttgtgcggcaggctccattaagtgtgtgcttgactcgtgtgcttgagcgagaggcttgaacagacttttaaagttccccttctcagcagcgtgtgttttccccgttctcttggacataaacgtttaatgttggtaattaggcctccttaacgaaagtcaaatttaggtagctctagggggtttttctggagtgacctatttcccataccttgctctttgaggtggttacaagggcacacacaactgccaaaccccaccaaaaccatatggtctgcgcatcttgtcgcacagacctcaactttaaaaaaacaaaacaaaacaaaaaaacaggttcttcaagtgttctatgaatttctgcctggagttaagaaaaggatacagtcctcttcctggaaataggtctcagctacctgtaaagacaaaagaagaaattaatatctgagtcaaaggacaatcttgggagccagtaagatcttgagaggctgatttggtagattactaacaaaaacactttcaccacactcaaagtcagaggactttgtaggtacaggacataatccttaggtctccatcagctaattaagcacaggccttctcaggtcaccacgatctagtctagttcaagtcctaagcatcactgaatccctaaagtttaactcttaaggatttggggaaagctacaaaggtacaatggggtgaaaaggttaaaatgatgattttattataaattagaagttagaaatggggtcagtgagatggctcagtagggaaagaggcgtccaccatggctgacaacttgagttcaagccatgtgacccacatggtggaaggagagaacacatttccctaagttgtgctctgatctccacaagtgtaccatggaacacacacacatattacatgagaatttacactattcatttcatttctagtttaaaaactatcagccagctcaggaccttatgggagactagttttggtgtctgcatatgtttgagaccaggtcttatgtagccaaggctggccttgaacgccatatgcagatgaggtgaccatgactcctgatcctcttgttcctggcctttcaagtggtagggttgtaagtagcaaggccataacagacaagggtatgctgtgatgtttttatttattatattttctttgagtatgtttgtgtgtgtgtatgcactagactttggcatggggagctgtggtgatttgaatgtaattggcccccataaactcatagggaatggcactattaggaggcatggctttgttggagtaggtatggccttgttggaagaagtgtgtcactgtgggtggtaggctttgaggtttcatatatgctcaagccactacccagtgtctcagaccacttcctgttgcctgcaggtcaagatgtaagaactctcaggtctttcgccagcatcgtgtctgactgcacaactgccatgccatgatgataatggactaaacctctgtaagccactccaatgaaatgtttctttataaaagttgccatcgatctgtgtgagttcgagaccagcctggactacaagagctagttctaggacagcctccaaagacacagagaaaccctgtctcagggaaaacaaacaaacaaacaaacaaacaaacaaaaaacaaaacaaaaacaagagttgccacggacatggtatctctttacagcagtagaaaccctaagacaggtgtcttctgcaattgctctccgcctttcttattggtattaattttgagactgggtctcactatatagtccaggctgtcctcaacttcacagagatctacctgtctctgcctcccgagtgctgggattaaagatgtatgtcaccatatctgtctaggtctcttatttttggactcaagatatctcactggacctggagctcaccgactggctagattggctggtgggttagccctggggacctgccttgtgtttttacacagatgctggggatccagattcaggttgttctcagacttgcacagcaggcactttcctgaagtcaccacttcagtcctgtttttaaatatttatttcatttttaatcgtgtatgagtgtgtgcatgtctcccccctgaataactgttttaaataattttatttggtgctggcaccttaagtaattgtgctaccgaaagagtccaaattttttgattgccgataagcaaacaacactgctgggagacatgggatggtgaaagggattgctgaaatacaccagcctagaaactttaagaatgccttaactttaaaatggaactcaaaaaatttattgctttggggaaggggttgtgtttttgttcccacaggacacaaaaattccttcaaaattagtaaagatcagatttgactgggtgagacctcctgaggatcttggctgcagaagtgagagaggaaggcaggaaagactacaggacaggtcacatgtgtgctgatcccaatacatgggaacagctctgagactagatgagacataataaatcttgtcggctacaaactcttcataacagtgtggctatacagtccaaatgacagtataaagttgatagatgtcttttatctgctcaaacataaaacaaatcatctttagctgacttacgaccattgtacattccatatttatattaatacagatatgtatgttacctttaaaagtttgtatgttttcagaacaaaaggattggacgtgaataaagacaagtagcccacatgattcagcctctcagaaccagtctgttgcagttttctcaaaattctgcatccataacaacttcaaaacagttagctggggtggtccagcctcacagattactctagccaagacttcagataagttctacactttcctattacacagagactaaacaacaacaacaaaaataaagtcatctgtgctgggactgaaccactatcccagtttcccaagggccccctagaaatgccattgcccctagacaacaagcagcagtctagagaacacgatgcccacaaccccaagaggtagggtggatggtcatccaatgaacacttttcattgtttaggggagttggttacaagttgttcttggtcatggtcagaggggaaactaaacaaaggaggttagattcagaaatataaacaaaaaaggaggggtaggtataggaaaggatagattgataaatcttttaaaataaaatgataggataaatggaatgcaaaaactaaattaatagaaaaattttaaaaagatagggtaaaaaaataattactgtatcttcttttaaactaaaaaaactacgtctcatatatttcacattggtatgaatttttgcatattgatacaagtttaaggttatttttgttataatgtatgtttctactcttgtttaaggtattgcacctatgcaactcatttaaaaatgtaatatataattaagaaatacaggttagtagttagtcatctatgataatcaaacttgtcatgttaggtatgttttcaaggttaagcctaggtttgtttagctcaggtatacttaatagataatggtccccaaactcgtcagagatctgatgaatgtggcgtttaaattgtttaacggaaaccgcttactatgacagccagagattcccagatcctagcagtgaccctaaggtctccaaggaagatgatggggcaccatgatgtctccatggattgtggcaatgctaagcactgggcgggaatgtcccaatacagcatctgcagccaggacctggccctgactgtggacaagcaggacacttaagagttgattgtcctacatagggcaccatttgtagggagtcttttttctgtccctgtggccagcaatcagataaacaacatggagactttttattaatataaaagcatggctaatagcttaggcttgtttctaactagctcttaccacttaaattaatccatttctattaatttatgtgctgccatgtggctcatggccttttatctcatctcctatgtatcatgcttcctctgtgtctggctggcaatcccacctcttcctaaaattctctctgcccctaaaatcatgcctagcttagcttttaattaaactaatcacaataacacatcttcacacagtgtaagggaatatcccacaacgatggcgctaccagtggaatgctgagaaacctttcagagttggttctgaggtgttgggggccctggcgtgtgctgtgtgcacattcctgtcacgtgcaatatgaagctgacaacatctggacgtcactcaacacgatcaccacgagctagaaaaagcaggttccagagtaccactgagttatgtctaacagaaattgctagaaacctttcatctacagatttccaaagaaaattaaacagtattgccctttaaagtcatcactttgccttttgtattttgctcacagttagttactaattgctgctcccatgtgagaagttttgatgggtttcattcttactatataatcagatggggggggggtgaagatatgtatcttcagtctgtttttaggtttccatggcagtttttgttgttgtttgaccttaaactcactatgtagaccaggctggcctcgatcttgcagcaattcccctgagtcagccactccaatgctgggattataggtgaacaccaccccatctgtgagttctataatcaccagggtaacaaaaccccacacttcaaagtaaagtatttctaggtgaaaagggaaacttcaaaataaatatgcagaatatttatgttgtaaaaatcccctccatgtaagttgagcaggacaatgaggcaaacttcactgccctgtttatctaaccctgaaaagcagcctagtggagcaggtagctcaaggcctttataggtgaaccaccagttgttctagtcccagttctgacacttagtggcatttttatttttaaaatggtcagaaccacccacatctgtaagaaacaaagccttgccttctaccccaacttccctagtgtttggaggtacaccaatatgcactgggctcaagctaaactttgagacattgtttcatactgtagctcaggctgtactggaagtcactaagcagcccaggttgaccttgaacttcccaagatcctcttgactcagcttctgagcacctatgtatcatgtggctcgtatgtcccgtttcttgacttctcatgcttcaacagaggacgaattgctaagttctttgcttgtgaccatcccagccttacaaatacacacagtcattttcccacacattcatctgtcccatgttattatactaagaccctaagcaaatatctcgtttaccttataataagccactccatacagtaaactcttttcttggcctgaaagaagtattcagcacacatcctacccctgagctataccctcagcatagttacattaattaacaaagcaatccaactggggctgattgggtggtgtccctccccctttaatcccagcacacaggagcaagcagatctctgtgagttttggggccagcctggtctacatagcaagttctgaattctggagttacatggtgagaccccatcttaaaagagaagggtggtacagggagatggctggggggtacagtgcctgctgtcaagtctgatgacccaagttaaaaccctgtagctcacactgtaggagggaagaaagaaatgatttccacaggttgctttctcaccccacaggtgctgtgtgtgagtgagtacaaacacacaggcaaaataaacaaaaggaaaacttttaaaagatttcacacatttatttgtgtaccccccttgtgtgtatgcttgcgtgagtgtgtgcatgtgagtgtgtgtgtgtgtgtgtgtgtgtgtgtgtgtgtgtgtgtgtgtctgtgtgtgtctgtgtgtgtgtagtgagtgcactgtcataggataactttcaagggtcaattctctccttttactgtgtgggtcccaggaattaaactcaggtcatcaggcttggtgaaccagcttgatgccttgattccaattactttttaactgataaagatataagttctagtttttaaaactacagactatacaattgccatctatattcatcttttcctttttagtgtgcagtttttctatgtatgcctcacttaagtaacttcgaatactcagaccaaaaaggtctaaatcttctttcaatatgttcagattcaacagtattcagaaacaaagcaatgactgcggaatctgccccaagatttaatctgctggtagcagtaccatctgccttcctacgcagctgtcaccttcaaatttcccttcacctagacccgtccctttcaacctgtgggtagagacatcagatgccagatacgctgcatatcagatgtttacattacagttcctaacagtagcaaaactacagttatgaagtagcaatgaaataatcttagggttgggggtcaccacaacacgaaaaactgtattaaagggtcacagatttaggaaggttgggaaccattgagcaagacatctttccaacatttgggagtgacctctagtctccattgtctcctatcttctgttgcctggtttattatactctatttcattgtgtggcttcttgagagagaagagatactaaaggcccggaagcaggaatattgtcagttggaagagctgctaggaggttagagctcctggaaaacactgagagaaagttggcaggaatcaagggttgagaggtaacaggcatagaccacacgaagccacggcaagggctttggcttttactgtgaatgagaagagatgtcactggaaggctttgagcaattaaataacatggtctccactgtgtcttcgctaagtcacagtaactactaggtagaaggggagagagctaaataacactagagtaaaggcagggaagtttgtacagtgaagaaattcagatggtatttaatgaagtaacaggacacttgcatattacagaggaagggacaatgcgatggctctgcaggtctaagtgtctgttgtgcaagcctgacagccagagtttgactcctggaacccatgtcggtgggaggttgtccatgcagttgccctcagatctccaaaatctgtatggtggcatgtacttcacatcccatcatacacatacaagctataataaatttaaaatatttgagtggaaaaaatgtttgtgcatgtgcaaatcataatgagaaaactatagatatttgtcaaaatgttaacaactgatgaatgcatgtgaaaggcataaggagatgtactgaaaattgcttcctctcctgtccggctgagtgtctcttgggaagtgaactggtgagagggcagagctgtactgcatggtattcgtgaactggtgacagcgagagcagaactgtactgtgtggttttcctaaggctttgctgtgcaccaatcgctgtactacacacttacattcaccaactcaatttatcttccaccagctttagagtgataaagaagccgaagccacatagctcagtaaatgcccctctactcactgggctcccttcaaggatacagactgctggggtgcagaggaacggcagttagagggctaggacactgcatgtttctgggagagggggcaatgcaaacagatcatctttaggcccagtcaagattacttgtcttcacgactgaaatggacctttttgtcctttctgatttgttcctgtacagggatcacctgccacagaaaagaaccatcttaattctaatgcaactatggcttaaggatagcaactccataaaaagatctgtttgccttgttatttccatctttatcttaaatatttttcccaacatttcactgaaattcttcagtgaagttcaaaccataggaaaatcaatggccacatgcgttcacccttggtttggcgacgtctgtcatttgttaagtttgctttctctctgtgcctcctcctccagcatcttttctctccataaaccacaagacctccagggctaattttaagtgtctctaatactcgcacttacgtcacctgggaacaaggacactataacccatcacttcagaatccacaggtaaaatgaagtttagaggcttgagagaggcacagaggttaagggtgcttgctcttccacagggctggtgttcacgttctagcacacaatgggcagctcaaaatattctgcaactctagcaccaggggatccaacagcttcttctggtcttcaagggtgtacacacacacacacacacacacacacacacacacagacacacaacctttaaaatgatttactacaatgctattcatttatttatttatttgcttttcgagacagggtttctctgtggctatggagcctatcctggaactcactctgtagaccaggctggtctcgaactcacagagatccacctgcttctgcctcctaagtgctgggattaaaagcatgtgccaccaatgcccggctacaatgctatttacatgctgctcatgttcaaacttcttccaggttattttaaacatggatgtattcaatccaatagcaaattctagtgctagtgttgtggaagtctgtgtgagcaaatgataataagaaggatgaagcagctgtgtacactttttgcaaacaacccactgtgcacatgcaacaaaggctggaagccaagggaaagctgctgtggtgaggcggtcctcaacgatggagagtcaatactgtgttaggggccaggcagcaggccatgtttcctcaacagtcatacagcagacagcatataaaagtatacctcttagtgcctggaagcaaagcacattttactttaaaaatattatgactgtttactgcagaagttgaaagagaagtaaatgagatgaaaagctaagggctagctcagtttggcagagtgctcgtttagtcctggacttgatccctcgcaccacataaactgggtatgctggttcaggactggaatcacatcacttgagggcaggaggcagaaggatcagcaattcaaggcatcttgagctacacagctagggtacatgaaacctccatcttaaaaaaggaaagaaaggaaaacacagacacacacacacacacacacacacacacacacacctttcacacacacacacacactcacacctttctctagtcccagtgttagtattcaggcatctgcactggcctgtccttggggctctgacaggacacgccctcagctgctgccactaagagcaccacctgtgcacattcactaagttcccttttaaagggccctgcccacctcccacccttccttcctccctatctgcccccccctttcctctctcctgctgctcccatctctggaggttgctacccccctttcccgttttttatgatccttatccctaattttaaaaatccctctgcttgaaccctgttgcacggggtctttctcttgagagctgcttttttaaaattacaataccaagtaccaattcattttagctgcaaataaaatgcaaatcacaaatatttaaatgatttccgtctagcaatttttaaatcttacatgtattgcctgcacgatgtatgtctgcacacctcttgtgtgtctggtgcctgtaggggccaaaagaggatgttgggaattgaatgaaatcctctgggagagcaaccagcgctttttaactggtccagcacctgctcaccttaaccatccatctcaagagtcactttcttttctctgttgcggactgggcaaagttaatgctgaaccgtagacttgtccactctgacagcacaaagccccacagttgtatctacatccttctttcccatttcaccatggctcttttcagaacctgccttaggaagtctttgttccttcagtggctaacaggcctcttggcatccagttggagcttactaaactcttgccatattgatttctctttatacttagctgaatcaccaaatacaggcattggctactatccaaatgacaaatcatccaggctacagcgtgtccaccccctagaataggccagatttcctaccagtcatgcgtttagggtcaacaatggcagggagggatcaatcatggagaaccggatttcaatgactccagacgctggcagcagcgttagtgagactgagagcaaaggctgtggtcttacctgatggaggaagaggggaagtgctctggagtccatctgctccacctcccctcggatcagggagaagagtggctgcagttctggcactggagctttgggggggtcatttgcattcactccagcagcctcctcaccagcggcctgcagctctgcattcgatgtctgcattaaaggtgtggcgtctcctgcagaacatgaagggaatgactgcatcaggctagaccccatcatggaggaatgctttcaactaccacccccacgacagtgaaactttcaagtaaaattaaccatatggaaaaacgacaacaacaacaaaccagaaacccaaattattgtcctccttcagttagtgatttgtgctcatgctttgcaaccatttcttcagaactgtaactgagtatcggtacagaaggggctgaggaggaagacaggtagctcagtcagtcaagtgtttgctttacaagaatgaaaaccaaagtcaatgcccagaagtcatataagaaaaagctgggcatggtagtacactctggtaattccagtgctggagagagacagggggactcctgagtctctctggccggccagcctacctcttagtaagagatggtctgaggaaaaacaaaggtggttggcatctgagggctgatgtctaatgttgtcctctggcctcaatatggacacatacacacaccacacacacacacacacacacacacacacacacacacacactgacacacattcacacacacacacattcacacacacactcacacacactcacacacattcacacacattcacacacactcacacattcacacacactcacactcacactcacacacacacactcacacacactcacacacattcacacacacaatcatgaacttcagcgatgtatcacccacacctctattttacctcttgagacaatgttccctactgagatagagtccataaggcaaagagctttggacaaggaaggagccagctatttttcagagtgaccttagaatgttagtcactataaatggagataagttctcagatctctctcctagatctgaccaactaaaacagtcaagatccttacagagactctgatgagtaagtaaaggctcgggcgttcacatttgtaatcccatcagttggcaggcagaagttggaaggtctgaggctccatgctttcttgagctactcatggagtttgaggtcagactgggctacaagagactccgtctcaaaacaacaatagcactggagagctagatataagaaaatccctgaggcatgctgacctaccaatctagccaaccagtgagccctgggttcaacacgacactgtcctagttaggacagtctacctaactgtcctaccataccattgctatgatgaaagaaacaccatgaccaaaagcaattagggaggaagggtttatctggcatatgcttccatgtcactgctcatcatagaagggagtcaggacaggaactgaacagggcaggaatctggaagcaggagctgatacagaggccacagagagttgctgcttactggcttgtcttcatggcttgctcagcctgctttcttatagaacctaggaccaccagaccagggatggcaccacctacaatgggctagaccctcccaaatcaaacattaatttagaaaatgtcccacagtcttgcctatggtccagtcttaaggaggcattttctcaattggggttccctcctctctcatgagttcagcttatatcaagttagcataaaagtagccttcacagaaactcagtctcaaatctctttccctctctacctatccataatataaaataatacaatggacagaaactgaggaagacaactgacataaatgactgacctctacaatgtgcatgtaaaataaacagtaacatttgtttaaaagaaagaattaagaggcagttggtgttgcttgatggtgtaaggcctaggactccatcccttacacagaaaaaaaaaaaaaaaagaaaaaagaaaaaaaaaggaaatgaaaaaaaggaaaaaatataaaggtcatcattgtaaaaaattgttttaaaaaaatgaaagtaaggctatctctccctggccctacaagaagtgtcctccagtcccctacatgaaacacagaaggttttcaggcagggaaataggcgcttgcaggaagagttccacagcatttccacagtggggtttttgtttttagttctgccaaaagtttacaacagagttctatcatgacttatataatcatgctactgaataaggacatactttatcttagggacatataaagtagacattgatgttctaactatatggagttacactgaaaatatgcccttactggtttcatgccattaacagaacaaataattcatattagaaaaccatctgccaggcatagcggccacacctttaataccagcagaggaggaggcagaggcagggagatctctgtgagttccaggacagcctggtctccagagcgagctccagaacacacaggactccacagagagatcctttttcaaaaaaacaaagaggcaggcgcgaggccagtctggtctatagagcaagttccaggacagccagagctgttacacagagaaaccctgtctcaagaaaacaaaacagaaagaaggaaagagagaaagacagaaagaagggaaggggaaggggaaggggaggggaagggagaaaagggaaactatttgttgccaaggagccagagaacggaagctctggaagccaggcagactgcttccaaccttatttcctgtagttctgcggagacactaacctctgattctaactttgcctccattcctctgcagcttgggggagacagcatctaccttctaagagcatgtgagcagtaaatgagacggtagagaccgctggacaaagcgaggtgtgcgtgtgctccccccccccccccagtcatcatctaaaagatcattatcctcacagtcatttaaaagatcattaagacaggcctacttcggagactggctctttttttaaagaaaagtatctggaggcaaaggctactaaagcttacatccccagtgttgcagtgagtaacagaagcaactatgctggaagtcagacagagtggcactctacagtggccttggcattccgaggaggcaggaggaacagttcaaggtcatcctttgctacataggaaatttaaagccagcctgggctacatgagagacaccccccccaaaacacacacacacatacacacacacacacacacacaaagagccacttggaagagttaaaatacttagttcaatgtttatcaacactgttagtttgaacacaagtggactccccatatagtaacatgtgattgtctttcagcttggcttcttttgcttagtcaggactcaagtctccttcacaccttcccatggcttcagatttcatttcttctcagcaatgaatccttcaggggtttgttttggcagggaaatgattaacaaaagaaacactggcatagccgtgaacttacagactaacacaacctgcacctctctactgtaccgaatgattttgtaacagctacttgggctttcacactgtaatacagaagctcatggctcgctcgccatgtgtctttcaaggtaattttgatattgttactttgaatgatgtcctatgagccttgtaaatgttttgctttgagtagcttaataatgcttcatgaattatcactaaatttctttgtggtacatacaaagttctctggtaaaaacacatttctagttaggcaagaaaatcaaagcatgaactgctacatgtaatttccctccactataaagtctcactcaatataaataaagctctttgctgctgtgcatgaacccaaatggttggagagaaacaagaaactccatttaccttcctttgcaaaaccatgtgagttacagctaaaatacccaccaagcaacttggtgatgctatttatacgttttgcagatgacaggcagattcatacataagccctaatttaacctaacacctgtcaactttattaagctgcaaaatagagtccacagttcaacatttgtctgttaacatttaacttagcttttatacttgattttagcaaaaggttgagaacccattttagctgatttttaaaaattatttgtaacaactttggggcagggattggacagcttatcttgactgagatacgtttattcagttctgtgtctctgtacataactgatccatttggcttggagcctctgcctgaaggctgtcaagaggtactctgcagaaccctgtgatatcaattaacagcctttgtcttgaaaggctacggttgcaccctggtaatctgccatctgtgaacacagctgagatgcaactgtttggctccaggctgggggaatagtgtgactggatcatttgatggcaaaatccatgagtatgacacattatcacagacaaatgagacttaaaggatgccaccaagaagctagcaatgacaaggtaagcatagtgtgatggaagccctagaattagggtttcaaagcaaaatggcagaagaggcagcccattcttccatgtcccttttattaacctgtctctgttacctgaagggctgcctttgccttatctaattaggagagtggcaggcattatgcaaccagaaagtcaaatgacaactagttgggtcacaaaatgacatttaaagccagagaggaaaagccaggaataaagttaccctcaagaaaccagggcatttgagagtgcttgtgtaatcaagccatccctagttgttgggaagataaatgcttagagaaagcctgaggagaccctgggctttcacctggatgaacttaatctctgcattgaacagggagtgaaagctgaggcagaaccacagtttgttaaaggagagcttagagccaagctgtaaagccctgaagaggaaccccagctacccagtcgtgaagtactaccctcggcctcccagagtcactgccatgtacacaaaggaacagcgtagaatggcctgtgtaaggaaagacatcaaacgaaggagaacatcccggggaagactaaacgtcagacctaccaaagaaaataagttaaccgtctctaacatgctcaaagatttaaggaagctatgaagaaaacaagaaagaactcaaagggagactgaaagagacagatcaaagaagggaattagcatttaacgcacacattctgtttgggtgacttgagtttagaaatacacacattatggatataattactgccactgaatgaacagaccatttgggggaatgagtggttagcagggcaaatttatgtttacagcaacaaaaatagtaaaaggaaaaaatacttccggttctatgattttactgtgattctctgagccactgtggaacttattcttacactgctgcacccaaaactgctgtgtccatgtcggccataatcttgcagacagatcaggtggaaacataaatgtgaggtctagcttctaactgacaagagaaatagagagcactctccactgaaatactggagtcactgtctaaacacactgaagcagtctcagcactagagccagtattatgagaaagataaatctgaaacagtcttccaggcctgacctggggtcaaagggatgcattatgtcattagagcataattaccacttgttccaaggctgggtctcctcccatgccctcaggccacagcctctgccttcagagagcatcaggcacaagcagggctctggtgaagaagttgggatggggtcatgctatcttattaacatagtaataaagtaactgatgataaagaataaagaaggtgacacatatgatgctcccaggcactggaactgtcaccaggatttattttaggtagcatcttaagttattgcttgttttgaaacaggatttcaccatgcagccatagctggtttgggactcattatataactcaggaaggcctcgaactcttgcctgcttctcctaagtgctggggttccaggcatgaacagctttagatggcaatttaaacatgagtattaacacttggggctgttttgaaggacacgcctctcatctgctaaattctccactgctgtttttctttttttaattgtttgctttttaagctccaactattcctattcagcaactgcaactctgaatctaccagcagcagcctagcatagtctgagggaattctgttccctcaggcaccgactctttcaaagttactaaggaaacttacttaaatctctgtcctgctaaagaactcaagactcaaaggttgaggttgaatcccgcttcccagagagggtgaatagcaagcagctcacctagctcacctccttgtgcctcccaagacgtctttgtgctccttctccaccctccacatggctcctccccacaacttcctgtcagctagttgctgacccagcctcctgaccgcaggttaattttatttaatcaaacacatctttgcatcattaaacagatgttccagagtgtaagcaaaaataacacaccttaaaataatattctgcaacactctgcttataaactgccatcgcatcagactctggacagctgcgcacacacctccaagagaaccctctcgttcttcgctggtagatgacacaaagcgcactttccctaagcaaaggttgcaagtctttttatggcttgtttgctttttggagcacttaaaagaggatgggctctaactaaaatcttcagtaagtcatactgagctgcagcctaggtctacatccttcagcggaacttatcttgattttttggtttgttttttgttttttgtttttttgttttttgagacaaggtttctctgaggctgtcctggaactagctcttggtagaccaggctggtctggaactcacagagatccgtctgcctcagcctcctgagtgctgggattaaaggtgtgcgccaccactgcccggcggaacttatcttgatattaaaggtcttatttattttttccttccaaatacagggctcattacatcaccacgttatcctaaactcaatgtttggtggatctgagaaagcctctcacaaaatgaacgctgtaaaaccggaaggggatttaacaaatggtgccaccgagagtgtgcacagctgggtttttcggtccttgaccctgaggtttcaaagaggtgaccccatgcagctgtgaccatcccgccatgagctccctgatctttcttccctccagttttgtcactttctagagcttgctgcaggctgttttcattttgtattcatggcacacttaatgcacacaaatattgccaggaattaggctctaaattatgcagatcatgccaattagcaccaatgttgggaatctctaattttcctcttagacgtttgattagctgttctacactccaataggtcttattaaaaactaaaaatatgcaaggggcttgcccaagcatgcaactagctacgcaaattcctaaaccttaaattaataagttcttaaacttcttgtccacaaacaaacaactcaagtgccaaagttccatgtgaaattaatacagagcttttcaactctggcacagacttggttaatatgaaaatggccaggtcccaccatgttatcaagttcattccaagaacactaaatacatcagccaccaaatacaaaatgttttcatgtttctctcagatacatgaaggtgaacaagattcttaaaattaaatgaccttatgtggaagtatataagcaggaaagggtgtaagtaaaggcatgtgtgagcaagcctagagacctgagttcaatccccagatcccatgtaaaggaggaagtcgagaactgatgccaccaagtcctctgacatccacatgtacactgcccgaacccgtaactcgtgaattttaaaaggtttataaaccagcaagtctttgttgaaggagagagagagaaagagagagaaagagagagagagtaatccatatcttcccccccccccgttttaatctgtaattctcttaaaactcctattatctttggaataacaagatcaagtgagaaaggaaggttagaacctcgggaatgaagtctgaagggaagcaaggagaaacaaatgtaacagcactctgcacagtttgcatcaaaggtggtacatcaccgaactgtcctttagcaggaacctttgtgttttgtggccctgtggagctatataacctgtttctgcacacacacacacacacacacacacacacacacacacacacacacacacacacacacacacacacacagagcctctatattcttttcaaacatagttttactgggatgtaatttacatgtcttacatagaagtcacctgtttgagtacagaattcaacagctttactatctagctccagcgctgtctaccgtggaaagtctaggttaggggcttctttcatccagcacaatgaatgctgtcaagactcatcctgtggcttgtatcagcacctcattttctactgctttttaaattttttttcactttctactgcttatgtgtgtgctttgattttttgtggctcttcccaatgttcactttcctggggttttgttgttgttgttttgttttgttttaaataattaaagtcaagtaacagaataaccattttaaaaacaacacaagaaacatttaatcaaatgcagttttgacctatgttgatgcctggaggcaattatcttaaacaaaggaaaataggacattatctctttgtaggaatcatgatcccgtaaaaatctggagtaaagaaagagaaaccaaaggagacttcaaaaccgcggttacatggcacatttcaattagccctgaaggacagagagagagcaggcatggtggtccatggaagaggagtcaggaggactactgtgagtttgaggccaatccaagttattcggtgagttacagaacagtctgggatactgtgtcaaaaaacccaaacaggagcccctaaaatatccccttatttttatgtttgtctatatccatctatgtttacatataattaaaaaatacatgaatttggaggtataatttttttcattttcaccatgtataaaatcccattacttaagtaaatatcaatttaccaggactgaatgtagtttggggacagaatctgaaagctgcactgacaatctgacactgtatttggggtttgtggttcaagacatggtttttctatgtagttctggctgtcctagaactcactactctgtagaccaggctggcctcgaactcacagagatccacctgcctccagaaggctagcattaaaggtgtgcgccatcaccacccaacttcagactctattttaaaagcaagcctgaaatcacaacccagtgactagagaaagggctcatctcagaccccgccccccacggtggagactgccagcatccctcacgcagccccttaccgtctccatcacctctacacttcactgccccaacttgtttggcacactggctgtggctcccattacattattgtcaagcttgttgggaaagtccatccaaactggtgattataacacagcacatttataatctggaccttgctaatctcccaaatcttgggcattctactctgctttttctcctcgactgtcctcagccaaaaaagatacagagatcagccaaaacacaggatggtttctgtgctctgggctactctgacgacttccttcctcttcatccttatctcacttgtcctatctcagcttagacatcagttcctcctggacgctttgacagctctccctggacactgcactccactgctaagggcatgcttgaccctgtaaggctccctcctctgctaggctgcccctgcttgttactgaggctccctcacccgaacataacaaactgaaaggctgatcatcagcagttgaagagcacatggtatacaaaacccaataaacgcctgctgaccgagtagtcctctgtggttccaagactttgctgttatgtaaagcattatcacagggccctagttaaaacatcttcaggtttgcggagtagaggcccccaaaatgattgtgcccaagcccacgaacctgtccattccttcatgttacaaagagaactgaagcagcagatggaggtgacccagttactctgggtcaccgaggggcctgtgtgaccacggggcccataacataggcagtggagtcaaagtggcatggctggctgggaagatggaggaagagagccacacactgggcgagaagctggaaagcagggaactgactccccttggaggctctaggaagaacttggttgggctgatagcctcactttagcccagagagtgagggcagactcctgacctaaagaactagatgacacatagtgtgtgtagtgtgtgctgttttaagtctctagagttggggaaatctgttaggagaccaggggagttctttccttctttcttttctaattgggctggagacaaggctgatggataaagtggctgtcacacaagcatgaggaccagattttggatccccagaattcacatgtgactgactagagacatggagttggaggccagttagaaaagttcttctatagaccaagtcagacacataagatgcaactgggagtccatggtttttttttttgtttttttttatggcatcaccagttgttattttagactttggtaacatgccagtgtgcactttctatctaatgccaaacacaggttcggttcttagtaccacagacaaaggagctgaggcagctaaggcagactcagtcagattcacttcttaaattttaactaagacatgtctccccaaagaatgttcagtgacacagaaagcgcaagaacttatccatacacacttgtctgttgtcccgaggacaatgctacacggtatgcagtatctgcttccttgcaggtaagctgtgacaagggaggaactgagtccctgatggcagatcagccagccatcccacagctgcaaacccacagctctgactataccggcccgactccaggctgtagatccatttccaggttttgtcttcctccaactcccagccctcagtgtctttgaccagctggacacattgtgaagggcaaaagaagagcgagataaggtggtgaacgcagcagcagctccgtttagaagagtctgccttcctccgtctccctccacacactgcctacctctggttctggctatttcctgagctgttttgtctgatgtgtagataccatggtgacaagtgctgagtaaacaccaaatgttgttacggcaatctttagacacttaatttgaacttgtctgttaagtcatacaaaatttgtgagccattgattgccaggagctgaagaactggagaaatggggagtgactgctaatgggttcatagtttcttttacagggaatccagtactgatgacggctgcacagttctgtggctataattaaaccactgtgccgtaggctttaaaaggcaaactttgtggtctgttaattctatctccgttttaacaacttgctattataaagaaaccagacattaacaaatgttggcaaagagacagaaactctcccatattttactgaggatatgaactggtggagccacatagggaaaacagttcacctggtaaacacgacgctaccctcatgcagaaccacctcccattgataaatgagagaaataaaaacatgttcacagaggcatcacaatggacaaaaagtataaaagccaacatgttcacctggacatgaatacctgagaaatacgctacatccataaaatggagcattccttggccatagaaagaaacagagtacaaatatatatatatcacaacctgagtgaaccaggtgacacatgtgacacatgaaagaaaacagtcaagacggaccagtgataaaaacatgtccagagaggacagatctatagaggaagaaaataaattagcaaatgcctacaagtgggatggctctaaggaaatgactgctagcaggtgcggggtttactgggctttctcgctagttctatggtcagctgacctggaactatgtagtcaaggttggcatttctacttctaactcccaaatgctgggattagaggtgtgagccaccactcccagataggtctcaattcttaaagatagcgccatcagactggaggacagagccgatgtgcctttaaggacagttcatacaataaagcaaggtagtacatgtgcatgtttatcaacagatttttttttttttttacaaaaaatgtattcatcgacccagaaaagacaaaggaatatgaactatcaagttataagttatctttactggagccaaattacggttacctcattaaataaggaatagttaacagtctctctgagtgcttgaatgtttgtaagcacatgtgtgtacagctatatttgtgcaggtatgtgcatacggaggttgataggccagaagttaaggctgggtgttttcctcatttgctctccattttcttaactgaggcagggtctctcactcaactcggagcctgtctacgtagcaacttgtctcaggaatcctttctctacctaatagcactggggtacatgtaggcctccagaccagctggaaagagagctcagctggaaagagcactggctggacctggattcaatttccagcatggcagctcacaattgtctgtaactacagttccaggggatctgacgccctcacacagacatgcatgcaggcaaaacaccaacacacactcaaaataaaaataaataatatatatatttttttttggttttttgagacagggtttctctgtgtagctttgtacactaggctggcctcgaactcacagagatccacttgcctctgccttccgtgtgctgggactaaaggcgtgcgccaccaacgcccggcctaaaaataaataaaactttaaaggaagaaaataagaaaaaaggaatctgaattctggttcttgtatttgttcagcaaggacttcatctactaagctaccccctcagcccatagttttaatagtttactctaaattttaaaactacagatgaaacccaggatatggagtactacatttcttatcagcccaaggacatgagagcagaatggaggagaagacattctcttaattcactagtcctgttgcaaacattgccggcctgggcacactgtattcctgtaaggacttccagtcaacagcatgccagcaccgtcatgtctctgacaaataaaacaaccaccaccaaataaacaaaaatcccaatcaaccaaacaaaaacaggcacaaaaatcaccagtggtggcttttccccatgaatacctggtgagtcacacaaacctccccagctgcagtcttacctgtcaaactatattctgaaggaaaatgccaattactttggaaccaaagatacacagatatccaaaccaggtgcctaactcaacactggtacaagacaggaaatgatttaagttcatgtatcctgttcacctactgagtgaggcagaaagcctatgtgaagttgtcctagcacacaccatcacagggcagagcccaaggccccagcgacggagtaggaaagtttaagggcagcagacaaccgtgtctttataacgaagtggactaaacaggtcatggttcctccacagactgtgacactggaaagaaccacacagtgggatctacagatgaagctgcagaacaagactaaaagaagaaaagcaaggagaaacgttggtttttattaaaggatagtaagataatttgaaggacttacctggaggtactttcttaggagtcccttttttggctcttggacttctttttccaggtggttttttgtcctgtcccgaggaaggctgatcatctttgggaccttcgcatggagtctgttctgctgtctcactgggggctacctcacaggggggcaggcagctttcattattgttgagactgtcctgttcaaacaccgtggctcttcccattgcactgtcactgccagtcagacccgcaggcctgtccccgtcaagctgattttcattttcatctgagacagaaggcaagggcgttactctcctttccacgctttcacccggatgacatccatcttgtggttctatctgaagacggtatgtaggagcttctctgtcatccattagcgcatcttttgtggaactgtttacagtttcttcaaagtcctgccatgcctacaaagacgaaagaataaaggctacttcactctgtgacctctggggacatacatggtctacagtttctcacgtcctttcatttcacagatgttaggaaaggaatggactctgttcctccctcttcctcacctgcaacctcatccgaaccctacccagttctgcatgttgctacaggggctcgcagaggacatcccactaaaccagggtgtaaaggctgcctgcactctgggctgccacggtgctctaggtgtttctgaacatacatcggactggggcggctgtcttgaggaaagacattgctggtacgcaggtcatctgctaaaaccaatcactcatgacaccctggacatgtgccaggacagtaagagccagccgtgcaagtacgtgcttgactacacggcagcaacatttacaaatgggaacaatggaagacatattgttattattttttctggaaaggcacatggggaagataatttactgtttcactacaccttttactttctcaatacggacactggcactgctgaggtgaaacttacagcttgaacaagagaacaggcctagaaacacacaagccacacagatccacaagagatcaaaagccagttagttaccagccattttttaccttagcattcaaaagtacattttaagaaaaagtatgtcaaccaggttatttatgcttgcttagcactttttctgggtctgaatcaactgttgcaatagttctggaaaaaaaaaaaatctcctcccctcccccacctcaggtgatagtactttaaaagaaaatcttcaaatgggtaaggagaaatttttattcttttttttttaaaaagatttatttatttatttatttatttatttatttatttatttatttattatgtatgtaatgttctggctgcatgtatgcttgcaggccagaagagggcaccagatctcattacagatggttgtgagccaccatgcggttgctgaactcaggacttctggaggagtaagctcttaatctctgaaccatctctccagcccagaaattctcgttcttaaaaaatacgtaagtgggggctggagagagaccactggggttaagagcacttgctactcttgcagaggaaccagtttaaattcctgacacccacacagcagctcacaaacatccgtattgccagctctatgagagccactgctctctctctctctctctctctctctctctctctctctctctctctctctctcctggcctctgcaggaacccatgttgcacacccatgcaggcgacatgggtaaaataatagataaaagataaaataagataaaaagataaaaatagcaaaaataaaataaaaaaaataacaaaagtatgcaaataaagtacaattctctttaaaatatataagcaaagccaggcagtgtggaacacgcctttaatcccagaactcaggaggcagagtgggtctcaggtgggtctctgagtttgagggcagcctggtctacaaagaaagttccaggacagccagtactaaacagagaaatcctatttatgaaaaagcaaaacaacaacaaaacataaacaagggctgaggatgtagctcagttgaaagggtgcttgcctagactataagaagctctggcttggatccccagcaccacaaagactggacacagcagtgcataccagtcatcccagtacttgggaggcagagggagtcagaaacttagtgtccttctcagctatgtagcaagtcagaagccagactggatacatgaaaccattgtctcaaaaaatatatacacaaatatatcatatgcataaacatatatatatcacatatatgtaacaaaagtctacagtattaatcacttataaatgtattacgtatttgcaacatattttgttactgagatgattatttcatacataagggcattcttagaaaatataaaaatgtctaatgatgggggatagccttctgtatatatgcttctcttattggttgatgattaaaacactgattggtcagtagccaggcaggaagtataggtggggctaccagatgaggagaattctgggaagaggatgcagagtgagccacaagagagatgctatgtagccactgaaggaggaacatgaaggaggaaccagggaagccaaaagcacatggaaatacatacattaatagatatggggtaacaactaagagagagctagccagtaagaagcccgagccattggtcagtttacaattaatataagtctctgtgtgtttatttgggtcaaagcggctgtgggaccaggcgagaaagaaactccatctacagtcaaagtctgaatttatttctatttttttttgtttttgtttttgttgtcctttgaggtttgttttgagacagggtctctctacatagccctgtctgtcctaaaactcactttgtagaccaggctgacctagaactcagagatagcctgcttctgcctcccgagtgctaggatttaaggcacgcacctctattcctgacttctatttctcctttaatggtcttggctgcttgacagcatatttacagtatatacaggattttatcttctaaccataagagaccccgaggtcacacactaagggacctaagacagaagaaacagcagctgaggaagcccacacactgatgagttggcttcacagccccttactgtgtgtggcagccacttcccatgtctgacatctggtcttcaaagcaaggctacactacaggtattcacattgtgtttgaaatgaagaaacaaaatactaaggtcctaatcctggaacagaagcagagctgaacctgaaactcttgtcttcctggcttgggtcctaaacagttcaatacaatggctgaggacagaagcacctaggttcaaattgtgtccttgacattttataagctatgtgggaaacatgagagttacctagcaaccacacactcctcattttcctcatctgtgtgactgtagaactgtagagaacctgtctactggttgcgttttcttctgtttttggtgaggttagggattaaagccacggctttcataggtgaatgtaccatgactacgctacatgttcccagccatctttcactatacacgcttagtgtctctgtgtgtgcatgtgcatgcatacctgcctgcctatttttctgtatgtgctgttatgaaggtcggagaataacttgtaggagttggctccctccttccaccatgtgggtcctgggtattgaactcggatcatcagacttggcagcaagtgcctctacccactcattactctgctcctaactttcttgaattttcatctgagacatgacattgtcaagttgcccaggcagacttcagatctgctatgtagccttggctggccttgaactcatgattctaatgctcaactttctggtattctacttactatgactggcagaaggtcacttgtgacgcttaggtaacaggacaggtaaggctcttcagagagtccttcatgcacacagcaaacacttaataagtgttacttcccaggcagactcagggtgcattacacactggtggctgactcaagggacactcagccttactgtattttcagaaacagcttttccaaacattctagaaatgaccaggctctggatgataaacaatgctgaggtatcagtttacaaaggagggctctcattcagtccccgtagtacttacatgtctcttttgagtgtcctgtttcagatgactaagatactcagaaattagtggttggaactacttgggaagggccggagagatagctcagtgagtaaaatgattacctttcaaacactaggacatgatttgatccccagaactggcattttaaaagccaggaatactgctgggtgttgtggcatatacctttaatcctagccctgggaggcaaaggctggcggatctctgagtgtaaggccagccagggctacatagtgagaccttgtttcaaaacaataaccaaaaataaataaaaagccacaaaagcatgcatttggaattcccactgcctcacagaaggcagaagcaggaagatcacttgggctcactggccagctaacctagccagttcagtaagcacatgtatgtctataagtaaaggtacacagctcctaaggaacactctgaggtctggcctccacatgtacacacgagcacacaaacacacacacacaagatttctgggagagcagggcataatgtacacactggtaatccccatacaagaaaagacagaggtaggaggatcagcccttgagggacagccagctacatgagaccctgtttcaaaagcaaacaactccttgttaagttcgcagttacacatatttgaaggtttgccacacacctggctgcaagttcaaagtattcacacaagagactcaattctcatagtcagcagcagatagttacttcaagtcctgttatacagttaaagaagcagagactcttacccacagtgttctgtggacaaaggagctacaaaaatatttcactccagtgtccctgtccaccacccacctaaggcagagacatccctccaatgagcaagttcaagtttctagaggcgcttttctcttccctggaaaatagtacatgacccaataaatggttcccaggagtcctcttccttctattgagagcctttctgggtggtctttgggtaggttcacaccatttaagtgaaatagccactcccaggaacatcagtttcctctccttgggcctcatgacaacttacctcctactgtttcgtggccacacaattagtttaactttcaaaaggaacgccttcaaactgctttataacactgggtctcttgatctgctaagattttattttatttctttaattttaattttgtgagacacctaacaatgcttcaaggcctgattcaaaagtcacttacccccgtttgcctgactgatgtctctgtcctcaaagactcccacataatgcactcctcgacagcactctgccagtcagaatcctccccagtatcactctgcaccagagtgctccccaagtattgctctgcaccacagtcctcccagagtatcactctgcaccagagtgctccccaagtattgctctgcaccacagtcctcccagagtatcgctctgcaccagagtgctccccaaatattgctctgcaccacagtcctccctaagtatcgctctgcacaatagtgctccccgagtatttctctgaaccaattctgcatgtgtttttatacttaagctttttgaatgtccacaatctacttccaagccctgtttgtcagtgtctggctctggctcctatggctatcaggcacatggattaggttttcactagaaagggggagttttcttagaaagggggagtcagatgttaactgccggctgcagcctgaccctgctctaagaggtaaaggggcctgatgcacagtgcttggcacctgcctgaatttttttttttttttttttttttttttttttttggttttccaaagacaaggtttctctgtgtaacagtcctggctgtcctggaactctctgtagaccaggctggcctcaaactcacagagatctacctgcctctgcctctagagtgcagatattaaaggcgtgtgccaccactacccagcacttgtctgaattcttactgccctgaatcctaatcattaacaaactcttccagctttggagttaaaagcaaaatgtcacatttctctctttttctgccagcaatgggaaaaggactgaggaggtccaggtaaacaacactggctcaaaacctgtgctaacacttcgattgatgcggggccatgaggacatgtgagtgtgtgttcactttatccacacaatatggctattctgttagaggctctgtgtctgggccaattctctctacggcggcactaatgccgaatcacggctacaacacagacactaacatattttgccttttaaaagcatgacagtaagtctgcccgtttccacaagactcttgtggcaaaatagcattccaaatatgtacatggtgtaagttgtatgacacattgactctccagctgaagaatttcaagcaaagatattcaaggaaggcctatacaaaacatgaaagccagaaaaccttaaggaagaaatatcaagcaaacaaacattctaaattaacattctagaagaaaatctttgctaaaagcgcaaagttaatcacatataaaattttaattcatttttacatttgactagatgtaatgatattaaacacgaggtgttattaaagtgagaaacagcgtacaggaataactagatgcatatatatatatatatatttcatatatatatatgaaacactttaggagactgcaattgccacattcctttcattcattcatgtaagactgaaaatactctttcacaggtttcttcatagcaataaaggttggcccggtggtggcacctttaactccaatactcaggaggcagaggtaatctgatctctgtgagtcccagttggcctggtctgagtgagttccaggacagccagggcctcacaggaaaaccctattttaaaaaaccaaaagccaaataaataattaaacaaacaaataaagactgacttcttctaagtttgaatttgtcagtttacagacaggtcaaaagttccaggcagtgagccaaggagctgccctactgctctcaagtccagatctgccatccctcaccaactcaagaagaaatgctcctactctgagttttctactgtggccattcatacatgcattcagtcactctaccaccttctcgttagagacgatcaacagacacgtcctgaaagtctcaggccgtacacgctggatgctcgggtgctctgccatgatcctgccagtatctcagcagccctgtgttagcaggaagttcctagaagttgtcagtatctcagcatccctgtgctatcagaagtttctagaagttgtcagtatctcagcatccctgtgctatcagaagtttctagaagttgtcagtatctcagcagtgctgtgttagcaggaagtttctagaagttgacagtacctcagccacggggccatctgagaaccacggaaaactgttttctaaaggaacacaggacacaggaaactcagataatgcctcctaaagtgagattctctaacttttactcactgggtgcagccactatggaaatcaggatagagttcctcaaaaacctaaaaacaaactagatgtgaccacatttgcctatgagcccagcacttagtagcgaaaggtataaggatcaaatagatgttcaagctatccttgtctatatagtaagcctgaggtcagcctagggtacatgataccctatctcaaacaacaacaacaacaaaaacccactaaaaatagaaggatcaaatgaccaaactctatttcctgggtatacacgtcaaggactctaagctctaccatggggatggttgcacacccatgtttattgctatactactctcaacagctaagagatagagccaacacctcatctcatcagcaggtgaacggacaagaagaatgtggcagacatacacaaagggattccaaaagaatgaaatcaggatgctgcagagaagtggatggaactggaaagtatgtcaagtgaaaaaaacaggtactgcctgttttctctcaggccaggaccctgggtttgcatgtgtgcaggcacacatgcagaatgtggaggccagagctgaggctgggacttttcctcaagtgcttcccacttactgtttaagcgcattggcttgggtagactggccggccagcaagccccaggggatccacccggccatctccccagcgctgggatgacaggtatgtgctacctcacccagcagcgtcttacagaggctacagatgttcagactcaggtctccacacttgtgcagcaagcactttaacagcggggccatcacctcagtcccaattttactgcctgtgtgtgtggttgtgtgtggtcatgaaactagaaagaggcctacgagaggcaaaaaggtgtggtgataacaagtgtacacgacaggaaagcagcagagttgctgtggaagggaccaatgggtgagaggcagggatgcaggggagcagactggaaaagaacagtcagtaagatcaatgtataaaagaatcataatgaaatctatttcgtgtatgctggtttttaaaatgaatgaaaaaaatgtagtcttcataagttctacatacaaatgcttatcagtcccctctcttaaaacgcagctaaaatgctaccttcagagctccttcactgacaatttctaccatgccagtaaacacatatggttcctgtggaagcaaaatgtgaattcacacaatttgattgacgggccactggatgttgcctatacatgtccaaacaatgccagcatcagtcaaatgacactaccaggtcacaagcaagataaagcagtactggataatatccaaggagttccgtgataaggtacgtgtcaagcagtatgagtaacagggatcttcagggactgaaattttcattttacataactacattaaaatggaaattaattcgtaactgaaagacccaagtatatgtggagcactgtatttgaaccttttacacctgcaaactgtatgaaatcaaaaagcagatcaagggctggggagatggctcagatcttaggagcactgactgctctcccagaagtcctgtttcccagcacccacacagcagctcacaaccatctgtaatggggtccgatgccttcttctggcatgcaggcacacacaaaatatatacatagataaaatttaaaaaaatacagatcaagcagtgagcatggtggcacacacctataatactagaacctaggatctagaggtggccagaggatcacagcttcaggtcagcctgggtatagagagctggagaccagcctcggtaacataggagaccctgtctcaaaaacaaggccagtgagatagcacagtttgtcaaggtacttgctgccaagcttacaagcatctctcacacaccaaatacatttttaaaaatgtaatttttaaaaaaatatatattagcttagcttcatggtttggattattatttctgtgaaagacaccatgaccatggcaactcttacaaagaacatttacttggggtgactcgcttacagtttcagagttcagtccattatggtcatgatggggacatgcggcatgcaggcagacctggtgctggagctgagagtgctatctatgtcttgtaggcaacaggaagccgactgactgtcacactgagggaggcctgagcaaaagagacctcaaagtccatctctacagtggcacacttcctccaacaaggccacacctcctaacagggccactccctttgggggccattttctttcaaactaccacagaggtatacacctataaactcagtacttagaggctgaggaacaaggattgctgtgggtttgagactaacctggcctataagactctatttaactctaacatataccaaagagggcaggggctctcacagtgtagtttctagaaacgtattacatacatggcttgtgctgtatttctattggtccatgctgctctgtgacaatgccttgacaatgtcatagtcatggttcatggtgactcattccatgctaattcattcttgctaatgtaagttatgcgacaggcatttcctggcacagacaattataattagtgtaacatgacaatgtaaatacttattgacagaaatggatgttatatgcctttaaaactaatttctactacttgtttatttattttcagaatgccaacctcagaattatgctgtcttcctttttgttacttactcatatccaaaagccaaaacattctgggcatatcataaaagtgtatcaaaaacaaaaccaggaggaaaacaacagaatcagactcacagaaggtgcatacactgaagaaatggggtggtctgtggggagagggcctcgggaattacctgggaagtataaagcagccaacgtgggaaactggaagagtaggggctactgtcactgtcttcttagatgaatactaccataaatccatagtgtccattcttccccatatacacacactgtctagagatgaatactaccataattccagtatccattctactctgtggtatatatactattttcaaatgaaggcaaatcccagtgcaattaaattatgaagtagtagctaaacagagatctgcaccctaaccttctacatgagaaactaccaatgggaatgccagaattttgaaggataacaaaaaaagttgtcttcagtctatattaatgccaactttcatttatactgtactctgcaaaacttaagtcattctttttcctaccttttttgtttgcttggtttgattttgctgttttgtttttctagacagggtttaacagccctggctatccaggctgctctctagaccagcctggccttgaactcacagagatcctcgagtccctgcctcccaagtgctgggattaaaggcgtgtgccaccaatgcctagcctttttctgcttttttttttcatgtggacaactgaatgacttatttcatgtttaataaagcagggtgggtggatacagtccactgctaaagcacatgctgcctaaggccttgggtttgtttgctctccagcatccttcacccaaaaaacatgaccatatttctttttaatctgcaggaatctcacaaatgttaccatcaatcttttatgactttgtactgtttagagacacttgcattctaaaatgccactttttggtttgtcagctcacaaagaaacccaggacaagtctctctcagtacctgtaattccaaccagcacttctcatcccatccccaaccctaaactccccctaccaagggctggacttcctgtcccctcccccaggcttctcattcctatataactcagccattttggttacttgctctcttggttctcttagctcctggctggccatcctctcttggttctcacgtgctttctctctaggtcatcttggtctctccccgccgccctctctctagctctccactggccagcctctctcatggccccgttcttcctgctgggtatgttcagtctggacccttgcagacgcctctagctaaattctctctcatatccatagtaaccccttctcaacaacacctaagaacgggcatgccctcgttttccttcagtgttggtatcagttccaaacttcatcttacttcttaagaatttggagtttttgtctaacaggtacaacactgaaccgacggcagctcaacgactagcccagaaacatggctctacagagctctgctcttatctcattccttcaggcctaaggttcctaacttcagcacttcttctaatttagttcacagaatgactgtttctttctctttcactcctactggtctaaaacaaggatcaatttctagctgactagtctgagagttacaacccctgctatctactttaaaggaactgctacaggcaagtttgcacatttccttctggcatcctattgtctgccttatcttgaaaaacagtgacacaatgttggccttggaataagaacttgttgtcctgcctcaaatccaggaggacctctgttttgaactgtgaacacactccaggtgttacacctactgctttttgtaaccagcattgaagacttactatggagacacaaacaaaacaaagtaagtctccacagggcaactgaactctgaccctggaagtggagtgctttgactgagttcccagatgatagtgccctcaactgtaactgtctcttcagaacaagatatatttacttaatgagggatgagccacgccaacccttaacagttcacactataaaaccaaagagatttctacttcagtaggaaataaattataagctgtatctataagctctgccctaactttccttctaccctatgaatctttgctacaaagagcaatgtgattaagagcaggcaagttccctgggcaccagaggaggttacttgtgtgagacagtagtaatgtgaatatttaagactatctgattttgtttgtttgtttgtttgttttgttttgagacagggtttctctgtggctttggaggctgtccaggaactaactcttgtagaccaggctggtctcaaactcacagagatccacctgcctctgcctcctgagtgctgggactaaaggtgtgtgccactactgcccagccagactacctgatttttaaatcttttaaaatcttattttttattacatttagtgtgtttggggggggtgttagcagcgtgtggaggtcagaggacaacttgtgaacgtcagttcagttctctcctttcaccatgtggatccccaggagggactcagatggtcagatgtagtggcacatgcctttacctgaatatccaattctgccacaaaaagtaaaagaaataagagccaggtgtgacacattcaggaagaattcaaagccagcctgtgcttcagggcaggggagagaaaataaatacagaagccaacagcatgagaaatttcagacggaaaacacaagtggagcgtaatgccaaagagaggctgagaatggatggaagatccaagagcccagagtcttcatgacatcatagggggacatcaattgttaatgaagggactgaaattcacgaggaatcagtctcccagtgtgacatccatgtatggacctccatgccctttgcctgagaaacagatgaaatctcatctgttcactgtgcccctgcaagaaacagccagaggcacctgtccctgcctactctaacatggccatgaagatcctgagcctcccttcttgtctaattagagactgctcacgtgacagagacaggagacaatatagcaactctgtgtcacctgcaagaaggaaccaaccagaaactacaaaggtgagcaaacagggactgcatagccttaactgtggagaaggaaagctgagggacctagggagctgtgggaactataaactgatgcaggcctaggacatgagaatgaattaattgataccatttttatgtacatgtgcatctgtgtgagtgtgtgctacatgtgtgcagggacctgaggagatcagaaaaggatgtcatagcccctggagttggaattagagttggtcaacggtggcatgcatacattgctgtaaccaacacctatttagtcagtcttacagtataatccttaactacattctaaatatttatccttacacccacagataaatgcagctctcaccctcaaagacatttctctttgcaacatacagagaccattacagaaaaccaaaaccaatcacaatgaagagacaaaagattatgtagtgcccagtccaaagagcatatcttctagacactcctgcttctaaggcttggggaacattacagaagagggggtggaaagatgggtaagatccagaggaatgtaagtttgtgtctcctagaaacatgggagaggctacacccatgaagtctcgtcaatgtgcctgcctaaacaagacctggatgacaccaatggacaggctaacatggaagggaaacgcttacaggacttcaacattagacaagcagctacaggaagcctggcaatgccgagagcaagggaaatggtctttgtggaatactcctctacatgtgtgagtgtgtcattgagattgggccaataaagaagctgactggccaatagctgggcaggtagaagttaggcgggacttgcagaaaacagagagctcgaagaagaggaggaggggtctctcagaagagggatatgcaaagaggagatgaatttgtcctactgccatcacctggcagagtatagataagaaagatgggataatttaaaatgtaagagttggctaataacaagcctgagctattggttgagcatttataattactgttaagtctctgaatggttatttgggagcggctgctgagacagagagaaattccatctacaggtcttccctaggaagacatgcccaattggttaaccagtaccaagtggtcagctctgagatcacatacaggcaggtaatactatatggaccaagcaagttgcatttctgtatttaggatgtctgtgttcgtgcacaaaacaagtaaagtaaaaaagagcccatgaattttagaaagaataagaagggtacataagaggtatgggaggaaagaaagggaaaggggtgcctgatataatttcaaaaaattattataaaggttttgaataactctgaaatagaaattttctgttaatagcagtgagtgaaattatttggtttaatttgctttaccaatggtaaatccttgaaaagaatatttacacttggaaatagatgttcatgatttattgtcatggtttcttaaattctagactattctagttatatattgtactggggtatatcttttaaaagggaggttttactgtggctggtgtctttgataaatatcatagtacatgataatcattaaaacataaatcatatatcagaaacctgtgattcattataatgattatgtatgcaaacatactattttaaaaagaaatcttcatataggcctcaaaaatagcaaaaggttattttcaaaaattaaaggaaagcatcaataaaaacagagaactggtcatgttatatatcacttaaatttagaaatttggtacagtttataacaattctcaagaatgttaagtcctagctggacatggcggtgcatatcttcaatcccagcactcgggaggcagaggcaggtggatctctgtgagtttgaggccagcctggtttacatagcaagttccaggccagtcggggctaactacatagtgagactctgtctcaaaaagaaggggaggggagatagacacactcattccataattcacagagacaaaaaaggcaatcaaaacaagaaatgggttctatcgagaagatggtcagtgcgaggcccagctctgcttttggaatcaatccctcccgttgcagacctggcctgccagctctgaaaccttaactcacattagttcagatacccgagtctgtttctttgttgttgtaagaatggaatcaggtaacacatgggaaacgggtaatgcagcccataaagacaaaacattgatcacacccttgtaggcagtcctggctgtcggggcattcataaaagtctgccttactggaaaggtccaatgcccgaacaaagacatttctggctgtgcattccaagtagaaattcgcttgtatttactcagcttaggactccatgtgctctcgggtatttacattttatcaaacctaaaaataccaagtatttctgtgaatcttcccctttctcatttcctgcatcatcttctgttagggcctctcatcctaagcgctccattacttaactgtcttttgtaatttctccttatagtttgtgctgaaatctttttttaaaaaagattatgtggccgggcagtggtggcgcacatctttaatcccagcacttggaaagcagatgcaggtggatctctgtgagttcgagaccagcctggtctacaagagctagatccaggacagcctccaaagccacagagaaaccctgtcttgaaaaattgaaaaacaaacaaaaaggttatgtgtagagttgttttgtcttatgtgtttctgtgcacttgtgttcctcttgcccgaggaggccagaagagcccctggaaatggagtagcagacagttgtgagcctccatgtgggtgctgggaattgaacacgagtcctctggaagaacatgaaatgctcttaactgctgagctctctctctaccccctggatacgctgtttcccccatatgctcacttttaagttacttttgccagctcgtgccctgtaccttccactctgaggccctgtatagtgtgcagctctatcagtgggaacctggtggatcaaggatcaccccttcacttttgggtgctttgctcttacaagacatcctaccttgtgttgctagccaagactacgctttatactgctcagcatggagccatggctacagagactcagggagtatgcacaactagagacagaaaagctctctgccccttctccgggctatgctcctaccctgcaacccctcccaccactttcaagaacccagatggtcaagagccattggggtgtgggacatagtcccttccgatgctctatctgggttccctgcttcagatacaaagactcgttttttagttcccacaggacagttaaaattcaagtccattggataaatacccccactctgttctctaaaatagctgttgaaacatgtaacatttgttgaacatttaatgagtgctgggtatatgctaacattctgtgcatgttttattccatttgcatagaaactctattaactttcccatcttatggataaggaaacagacaaaaataagtaaccagctaaggcttatcctagccagccagccattttcccagactccccaatggattttttttaaatcagcagaaacattagatggcagtctcagttatgttttgtactgcattatagtattaaaatacctgattggtcatttgtgaaagtgttactttcctagtgttagcaagatgtttggcatttccaagatacatgacactcactgccatttaaatttaaaataggattcttctttgagaaaagtcaacttacaagctagtggagaacacacagacagaaccaagaactgaccatggagaatagagaaatatctgacagaagggggaagaagaaagagaaaaagttgagcagggatctcaaaaccacaggataaatgcgcatttccttacatcatcaagacactaactccatgcggaaacgaatggattagtcagcagcacaccacaaaacacccaataacttgggtttcaatgaatgactttatgaaagcaagtgattatttaactctacagtgaaggggaagcacggtattggagtgggagaagaacaccaaaaattgtagggtgcttactcggtactatgctcatcctaagtggtttgttttcacagcaatcctagcaggcaactgttatgaacatggccatgccctagataaggaagccgaggcagtaaacagcttaggttactcatccatggccacactgttctcagagttgggacttaaacacagcagagagctctgcagtctgcaattcagtctctgaatgcaaagactccgtaaccaaggtagactgtgagccctgtcctgaagattccataaccaaggtagactgtgagccctgtgctgaagactccgtaaccaaggtagactgtgagccttgtcctgaagattccataaccaaagtagattgtgagccttgtgctgaagattccataaccaaggtagattgtgagccctgtgctgaagattccataaccaaggtagactgtgagccctgtcctgaagattccataaccaaggtagactgtgagccatacactgaagcgtttggacaagttaggggaagcacgaagggaaactgacaatactaaccctagtaaagtctggccagaatgtgacacatacctgatgagagggtacatggaagtatctccagattctatttttaaatgaaataagcagcattgtaggatccaagacacactacctcagtgttgcctctttcttgttgtagggtttttttcaaattatttcatgcatgtgctgctattattgcccaactggaacttaagctctgatggtaacagaaacaggccttttgcaatcctcaccacaacacagcccagggcatataaaaggtactacatacatgcttgttcaattgaactatatcactaaaatttcactttctctgcttctggcctaaggacaaaaatattattacatgagatggtattttaaccttacttaaagaaacccagagagacaagcaaagcttgagaaacagggcacttctgtccctgaaagattaaatatctggacaaggcagcaaatccacaaaagaacatatgaattagttgctttaaaatgaattaaattaatggactcattctgctttcggatgtgggaatattttgagtttgtaattaaagacatctgtgctatgcatattgaaagaacaagcttacaaacagacagagaatacaaaggaactgccctaagttctactctatataaggacaaatgaaatcaggccaggctcagctttaaccaaatcttcccatttggcttcttctcctccagttttacttgaaacattcctcttgtgctattctttttttttttttttaaagatttatttgtttgttttatgtatatgagttctctatctgcatgtacacctgcctgccagaagagggcatcagatcccacaatagatggctgtgagccaccatgtggttgctgggacttgaactcaggacctctggctgtcggtgctcttaaccagcccaattcttgtcccattcttgactatttttccactacatagaaaagcaacctagacaactccacattgtgacaaaagcaaagtgagagcctgtaaaacaagtggaataaaactggttctcacaataatgaccatgcttagtgaaactgaataaaattagtaaaataaatgttactaaataggatgctcctgacattttaaaggtgaacaactaaaataaagggatggcttgggataccaagtgcaaatggagccactcttggagaatttgaacagaaggcatgaaatagtggaccaggaagataataatagtatcattgctacttttttctgaagaatttttaatctaaaattagctcaaaaccaaacccaaactgggtgtgatggtgcagcctataatctcagcactttggaggcaaaggcagggggatgaccctgagttcccagtcagtctgggccccatggaaagttccaagagtgaatcctagtcctaaccaaaattaaccaaatttagaaattaaatttgggagggtcaggagctcaaagtaagggtgggctatatgcatagaaagaccctatttaagaagaaaaaatcaggaacaaatagcttaatgatagaaactttggcctagcaggcacaaagccccaggttctattctcagccgacacgaacgcacacactcgaaaaaaacaaagaacccatcctaaagatcagaggccacaaaagcattttctgaatgatttcctggcatgttcttttccttatcaagattgaaaatatctaccttaaaaaaaaacctttctaaggagttgaagagatggctcagtggttaagagcactcactgtccttctgaaggtcctgggttcaattcccagcacccacttggcagctcacaactgtctgatgccttcttctggtgtgtagatgttcatacatgcaaagtacccatatacataaaatatataaataaattaaaaaatcttccccaaagctatataacttggtaattttccaccaaaataaaaagcagggagggaaaatgaatccccaaaacagaaaacctaattcaatcactgaaacttttcaaagcaaatttgcttgctggaacaggactgacaaatgtttccatgttggcgctcccatgaatcttgaaggccaagtttccatgggttgctgctaaaggcaaaactatgtcctttaaaacacatctctaccaggtccactgtagagtgaggtggggaagggaggtttaatagggtaaaaggataacagagctgagacatgtagctggtgtcctgggatatcctagttcaagacacaaacacacagggacaaacaccatcagcacgggatatgctttcagtcagggctgggaataagcagagggtgtggggaaagcctgccaagaaaagctcaacaatgtcacccaggctggctctgaactcaatccttcacctgccttcaccgggatggattaggggtctgtgacaccatgctgggtaagaaaagaattctggatccaaattctacttcacactctgctagtaactgctttgaacagcttaggcaagatgcttgttccctgtgaactttaattccttcagcactaaaatcttggggttccacagacaccctgaagagactttctcttttagagctccatggaaaatgcctgccatgctcctctaagcactgacatcactgataatttcacttaaaagatgtaaaaacctgcctttatttgtgcttttggctcttaatacaactattaagccatagcaaattgacaggtaaggcaacaagaaccacattgtggaaatcaagttgatgtggggcagtctgtagtccatactgttcacaaactgagcctggatcactgagcagccagcccctttcagctccagggtgctggacaagggctcagagggacccaactctcctccccccttctcctctgctgactatggagaaatctttgttcctcacagcagctgtggtgttgtgccaaaggcgtgatttatgagttttaccccatgtttataaacatgtgaagacttcagcactgaaatgctaccttggaatgtgtttttgtgaaccttgaaattgaataagcttgggttgttccagctttcactgaaataaaaatagaagaattttttaagaccccactctcttctctttttttttttttaaagggttttttgagacagggtttctctgtggctttgggaactagctcttgtagaacaggctgggtctcgaactcagagatccttctgcctctgctgccgagtgctaggattaaaggcgtgcccaccaccgcctctcactctcttttgtacttttctagattttactattctctataataaatgtatttttctaactggctgtctcaatgacagtgtcaataagattcaattttcatcatacagctcacccatctgaaatggtctaacaatccattctagatattttcatcaccctgaaaacaaccactcccacctcacagccagctggtgatcacttcctactccccagtgggccccacagcctactgtactcactcaaacccctaatccccacagtgaggctaaagggcagacacaggttcaagggctgcctgagctgcagtgtgctccagaccaacctagggccacagcatgagagccttcctaaaaaaaaaaaaaaaaaaaaaaaaactacaccactctgcctgtccctatagatttacctattccagacattccatataaagaaatcagagcaggtgtagtaatgtacatctttaatcctaaccctgggaggcagaggcaggtggattttgttaagttaaagaccagcctggtctacatagggagttccacaacagccgggactacataaaagagaccttggaagtggaatcatgggatacatagtcttctgtgattggctactttcacttctcacagtgtggtcaaggtatatctatgctgtgtcatactttatttgtgcatttgactcctaacacttttgactattacaccataacagattgacaaataaagcatcagagtatgaacacaccatttcactgtaaggatagaaccacagtttctgtatccagctatcaactgataaacatcctggttgtttttagaatattatgactaatacagagagagacaatgaactgtcacagggactgggcacagatcagcttggctagatgaaaaaattatgggaagaccagtcttgcctctctctcagtgcatgctcccctctacgccagctcaggccgtctgggagaactgaggaacgcatcactcgccacactccctacacctgttcacaatcctcgaaaaccatcttcctattgcctactaattctgtaaaccctctttccagttagtaagcagttcatctgcctcaaaaacccaaaagaacttactactactactactactactactactactactactactactactattattattatgtgttctgtgtgtggttgtgtgtgtgtgagtgcaggtgcccacagaagccagaggcctgggatcctctgaactggagtgtgagctgtctgtgaactgcaagtgtgagctgtctgtgaactgcaagtgtgagctgtctgatgtggatgctaggaaccaaattttggtcctttgcaagagcagtacacacctctgagccctgggattaaaagtgtgtaccgccacgcctggcttagcagcctgggctctgaacagctgaacctcctctaggccctaggaccctattttaaagaatcacaatataactgctgtaacctacaaaactaggaaattctacgatgccagttcttaagagcctaagtggagacctccacagtagagctgaactgatcatagaaacaaacacaactgaattgtttcacaactttttgctcagttttcaggagtctaaaattaaaagatagcatttaaggatcagacaggagacagctcagcaggtgaaaacatgaggctcaagcctgatgcccccaattccaccccagaatccacataaaggtcaaaagggacagaacggactctgtgaacttatcctctgaccttaacttaatatgcccgccttctcttacacacacacacacacacacacacacacagagagagacagagacagagacagagagacagagagagagacagagagacagagagagagacagagagagagagacagagagtagcatctagtttttgttaaactggcatgcaggaggcagaggcaggaggaatgtttgtgggttcaagaccagcctggtccagccagcctacttagtgagacacagtctataaaaacaacttgctaaaagaaattgaattttacctactacttactgtagtacaaattataatacccaaaaaggttccatatgcatttcctttctttaaaaaattaagttaaaccaggtgtggcagcacatgcgtttaatcccatcactcaggaggcagaggcaggaggatctctgtgagttcaaggccagcctggtctacaaagcaaatttcagaacagctagggctgtcttgaaaaacatatacatatgttaaattcacataaaatcattcactgttttaagagaaacaaattattttttaaaaattaatcttgtgtgtgtgtgtgtgtttacaagtaccacacatgacagtcagaggacaaccttgggagttggtttgctccttctacattggtccccaggactgaattcaggtcatcatgcttggtgtcaagcctctttacctgaagaggcctgtcactggcccatgtctatgtatgagggacttgatttttcatcaaatgttttactagagacttatacaaagtgctctgtgtgagcatctgtagcataatcccaccgtacttagtaacattctgcttacctacagctccaatatcgagttcataggcagtgagtaacacagctccagaatctacttacgagcctgtgcatttcaaagtggtggattttcttacgtatgaatatcataatgtgttctcttgcatggattagtgctacttaaaattcacttctttaactcatctagggtaaagtataatatttcatatggcaaacacaattttaaccgtattataaaacctaagtggagcttaggttagtgtcagcttatctcctattcttccaaataaggagcagaaacttagcgttatctatcgtttcgggagttaagaaattacagtgtccaggatagttcttacttttaattaaaggctctcagcatctcacatatccctttcaatctatcctgcataccagaggcagattaatcttcagaaaacactacctttctgtctcacataataaaaacagtggctccacatacttgtggaacaaacaattcttcatgtctcaaaaatccataattacatgttactgtcgtctgcccaatttacttcatgtcctcccaccttacatttttactgagcatcaaaatattctctttgacacactcaaataaatctcaatatctgcaacataccattaccaatatctccatatctcttacagccagttcacacactgctcaggcaaaggacaacggtgtgaacccgcacagcatctacccagcttcagctgcagccgcagcgttgccaggaccaaagtgcactgcaaagctactctgaaccttcacctccaggcccacctatccctactcacagttagccgtaactggaccataacggaaactactgagagctacatggcaaccagcattttcctctcatctcagaggaaggcccccacatctgctgttctagaataatctttttgtacccacttttgcaccttctttattttgtcacagagcatgcctggaagcaagcctattttcagctccattctgcacactgggaagttcttgagtataaaacataggtctcctttctcctaatcttaaataaatgaggaactctgaactttccatgaaaattcatccacaggaatgactttccactacaaaacacacagaagacaaaaactgatgtttaatcagaaatattctgaacattctagatagagagagggatgaagaatgatttctgaaagcataaaggatccaaggtggtcaggcatggtggagttgcttttaatccagcactcaggccagcctggtctatataactggttctaggccagccagggctacacagtgaaccttgtctcaaaacaaaacaacaacaaaaagcccacctaatgtgctttttaaaaatgagttatcctgaaggactctaagggaaaaatgcatggaccccaggaatgggaaggggcaggaactcctgagctaattgggagcgtgaggataggggagagggagctgccagaatgagagaaggagagaagaggaggaaacagaggagcagaaatattgagttgggggaagaatagacgagagcaggatgagagataccatattagagggagccattataggtccgaggagagatatggcactagggagatttccagagacccacaaggatgacacgaactgacaatccaggcaatggtggaaaggataacctaaacgcccttcccctaaaatgagattgatgactactttttatgccatcctagagccctcatccagtggctgatggaagcagaggcagacatccacagatatacactgaactgaactctggaacttagttgcagagagggaggaatgaagatcgaaggggttggtaccagggtggtgaaacccacacaaacagctggcctgtacagggggagcacatggaccccagactgctgtctgggaggccagcacaggactgatccagacccctgaacttggatgtcaatgaggaggcctccacactctagggggcccctggtagtggattagtattttttccctggtgtaagaagggactttgagagcccatcccacgtgaagggatgcactctcagcctggacacatgggggagcgcctaggcctggcccaggatgatgatggactttggggagcccccattgagggccctaccctgcctggggagtggagggtggatagggtggggggtaggtcaggggtgggggaggaggggtgagggaagggagagggagaagggattgatattcgaaacaagcttgttcctaatttgaactaataaaaaaaaaaataaaagaaaacagaaaaaaaaaagttatcccaaatactgtatgtggataggagctctgaagaaaaaaatagtaaagacaggttttcctgagctagacattctaaaaaaagggaaaatcagtaataaaaatgtcagggaagaacacttgcagtgttttttgcttttgttttcttttgggattgctggtagattaggcctttccatttccccctcaaaaagatgtgtagttggcataggtgggctagaaatgccatcatgttccttggagtgtgtgtccttcttcctgaccaactcatcacactatcaatacggatggaagacatcaatagacctggctgctaaataagcttttatttaactttcttagacaagtaaaaaaattacaatgcaattatctttttttgtctttggagaattacttttttttttataattgaggagaggaatgaggttaatcaggtttttaaggctcacacaagccagagtgttctgaccttccctttctaaagcttctacaacaggaaccagtcagtagaggaaacatgctactttgggtgtgaggctctcttcaagatctctgctcacattgctaaggcaaaggcccagtgggaactctccaacagaggcttccctgagcactgagccttatgggaaggaggcactgcacgtgcagtcagagcccttagttctaaagcagacattcctaggatagttagttgctgcttcaacctagatgagggctcctgatggctaggcacctaggcataccttctgaggctgtcagggactgtgaatcttgcttaacagcaaagctctcctcagcaccgctgggggctgtatggatcaaaagatacaaactcctgtcagctgagagagcacctggaggaacagcagctggctttgtgaggtaaatgcttttgtagcttagcagtcactctgtaatagattgtccttgctaagaaatggcggagttccaggaccaattaaatgcattgaaaccggggttcacatgaaacactaagaagaaccttagcagggcggtggatctctgtgagttccaagccagcctggtctagacagtgaattccaggaaaggctccaaagctacactgagaaaccctgactcaaaaaaaaataaaaaagagacaaaaagaaaagaaaaagaaagaaagaaaagaaaaatcttttatcctcttctaacccaaatgtttacgatatgactgaagtagggaagactcaggacattgcttctatttttaacggtgtttacctaatgttttaggtatatctctaactgacacagcaaaaaaataaataaataaaaataaaaataaagaactccacaacaaatctaaatagttggagcaaaacatctgggacacaggagcatagctcagtggtagagttcttgcctagactatacaaattcgtgggctgggccagtgagaaattcagggggcaaaggtacctgacaagccaagttcaagctcctggacctacatggtggaagcaaagaaccaactctctcacaagttgtcctttgacctccatctatgtatgtgtttcactgagtgtcccttggcctatgcactcatacatgtgcacacacacactcaaataaatgtaatttttaaagttttttttttttttaaattccagggttcaattcccagccctcaaagagaacaaaccactcacttatgtagcatagaagaatatgcctcccacttgagacaattttcctgcttcatcctcccaaatcctgggctacaggctttaagagcaagcctggttactgctgagtatgagggaagagataatgcggactactttctcaaatccttataacttatgtaccttacacttggactaaataaacatttttccatattttgagtatgggggggcaaccctgaaatctttgtatgttcataagttttagtaaataaaatccattttaaaaacaataagggctaaacatgcatataacacaagaaacagcaggtaccaaactgccttaagtatagtgtacttaaaaatcctcaaacacccaggaaaacatacatcccatactcttaaagacccaagaaaaacaatgttctgttgcaccacaaggcgcacatactttaagggaatcattaacttcaaaatctacaagtacctgaaggggctgctatgctttcattcgattagaacagtgtcacctaataacactgagttttcaaaacacagttaatatagaagaagggtaaaatgacctctcaggtggtggctttccagggaggacaatgtagacattctcagaagacaatttaacagatataatcacaagataaagttaattattttttttacttatttactttgacacaaggtcttactatgtaaaccaggctagccttgggctcacagaaatccactgcctcagcctctctcttaagaattaaaggtgtgcatcaccttaggggctgtgatgttaattcctatagtcatagatactgtcaaaataccaatgcccagatgccactaaaggttgctactttgctacagtttcagaattcttagtagacagtgcaacagggaaaatgcagatttgtggttattttgataggtacatgctatctttccgttccaaatggccagtgaagacaaagcaggaagctctaacacagcattggctcagtggcacagtggggaggccacacaagggttctacctccaaatatggtaatttcaaaatcatgcctaaagcactttcagaaatctccaactgtcataaaacttaagaattcttaaatatactatatttaaaaaaacactccatatgaattactccaattgtttaaaaaataaaaggagtctcttgttgaaagtaaatttattttcccatgggggtgatcacaagggaaagtctgtattaatgtaaatcttagaggttaaaaatggaagaaaaggtggcctaatagtttaaagaaatcagaccttctcagccagaacatctctttcggaagcaactcaagcattaaaggtgttttttaaagaaaccgaaaaattgccagcctgtcagttttcttcctcaaataactaaaataaatttagtaggggtagtttgcagaaaacaatgttttaattttttttcttttttagaagggatctagctatgttgtccaggctgaccaccccccactcccccacccccagcccctgggcttctgagtcccctttctcagcctccgtcgtagctgggaccccaggaatatacaacttcacccagcttttttttttttcctttaagaaaaaaaaacttttttgttgttgttgttttgttttgttttgaattttcttgttttagatttttggttagattttagagacaggctctccttatgttacctaagttgttcagtcagacctccaactcacccaccattctcctgcctctaaaaaaaaaaaacaagttgtattacattgtatatttaagctatatagtgggattgtataagatacaggtgtatcacataagatacgtgggtattaaagtgattattaaaaggaaacaaatgctcacaatcaccatgttcgttaccccccatgcacccaggcatggctacaatatactcacttagccaaaagcttgcactactcctaactgcaactcttagttgtgcactagctcagtctacctgatcatcctgcagatttgatactttgtatccttttgcttaaaacttcaattttctctttgtggtccttaattgcattctttttatcaaaccaatggccaccaacagacaatcaaaccaactgccaccaatgtctagttttaaatgcaaatgaaaacgctaccagaatacacacctctttcacaaaagtcagtgtatccaccttttccaactctgtatttgctcctgtaaaccctccacaggctgccttacagtgagccaactgatctataaagactggcttttagatagaaagtctgtttaatggtcagggaagcagagatggttcttgaattaaatgataaggagtattaattaagaactttattagaacacaggagtcaggacaggatccccacagaagccagctggattccaccttacttcagctttaaaccacggatggtttcacttgagttagcacacctgctgtaaagcagctcgtggcaggtacctagatgatgggccagcagctttatataaagatgccacacttccctttagcaaacaaactcgggttcccacagtttcaaaaccaaaataccataacctcttccattctgaattttgaaaaatgaccttgcccttgataagaaacaccaggctccagaggaccacaccccccaaaccattacccatacttgaaaccggtccaggaaataagccaacaacagcaggtaccctacctgtttcacaacgttcaaatgccccagggttctccctactcgacaggcttagtagacaaagactcatgcagccctgccacactgttgacatagggatggaaagaactgtcacaatgacaccccaggaaattactgagcacactattcatcttctgataactcactaaacaagtgctgggcatcagtgctcactgaagcagagtgtcaacacggagcaggaagaggcttcttagagcccttctcccgcacagcaccttctcagttagaaagaaaaaaacaaatgacaagaaagggttcttaggtagcccgagagagtcagactcccagggtagaaaggtattttaagcatcgaataccaattggctacgtgccagccaatgagggcggaaggcattggatacaggtgactcttgaacatttgcaatggtatcagtcctaatcgagatgttctgtgagtgtgaaccacattagaactgcagatttagcggagaggattaaaaccattaaggctatttccacctggtacatgagactgctagaaaagttttagaattgtcttccatctctttgggatggtgctgccccaggctcagttctgatgcaaacctgaactgtcatccagtgttccccagtttcagttctcattcaaaagctataagaaaactaacagtagtttgcttcctcaagcaatttgattatgataacttaatatgaaaaataatttaaagacagccaaaaagtaccagcaagcactattaagaagaaaatttacttcaagggggcaaaaacaacacaggattaaaaaaaaaacaaaacacaattttatgatcacaaataccttaactaagtttttctaaaaatgtaggtgtgaatgctgattataagattcattttaaactaggcaatggtggtaagtgcctttaatctcagagctcacaggcagatctgagtttgcagccagcctggtctactgagtgagttccaggatagccagggccacacagagaaaccttgttttgcaaaacaaaacaaaacaaaaattattttaaaagtgaaatgactgtttcatttttagcgtctgggtcctaggggtggaggtggtttctgtattactcaagtacttgcagacacaaacaagtaaaccattaacactatgaaaatggaaacaactgagcacatgatacatgcctgcaatcccagtcaaggcaggaggatgacgagtttaagaccagtttaaattacagtcagtctttcaaaagaccaagggtgaaggcttattcagtaaagcatttgcaagcatgaacaccgagtcctgatccccaaagatgcaaatccataaccccagtgtttaggggatggattgctggtgctctctggccagccagccttacagaatctgttagggacacgttcagggacagaacatgtctcagaaaagtaaagtggacagtgactaaggaagtcatctgacaccacaccacacacgcatgcatacaccaacatgtacacacacgtacatcacatacacaaaccaaaacagggtactggggggtagcttgggggtatatcacttgcctagcttgtgcaaggcccagggtgtggaccctaaagaagaaggggagagggggaaaacggtaaataaatataacttctctccggccagctgttaaaaagcaaaataaacactgtcctaagatctctagaactgattaggctgtggtccgcaggcattatgaaattttaaaaaatgtacttttcccacagtgttaagtacatttaccttttgtggtgccaggtatggaattcagggcctgatacatgctaagaagcaagtggtctaccactgagctacattatgtacccttgccttaagaggcttactttaaaagcgaaagactcaaggatacacttggtaagtgaactttgtcattgctctcatttaaaaaatcattttgctatattcagttgttaaaatattgctctgggaggggtgaatctagactacttctgagtttataaaaatgctcattttggggggatgatcatctttgtttttctccttttctgagacatggtttgagtatatcctatgcctgccttgaactcataacgcacctcaaactcgtggaacctcagcctcctgaatgctaggattagaggctttcaccaccatgcctggctacaaaattctcagtgaaggaaggaaattaaacaaacaaacaaacgaacttaacaaaattaagatcagtgaatgagtccttgggatttccaaaacagttaatagcactgtactagcttattcaaaagaggccatcttcaggtgtcaattctgtttgtcctttagtttcatcagctaaggataatcttcaggatgtttggcaggtgacacattcctcagaaactctttccttgtgcatttaaatgccaagctcaattatgctgccagcggagtaagcagaaaggattgtacatattttaaactagggagatgattggccgcagcttctccctgccttgatggaaaggataatgggcaaagctttgagtccgatgccccaaacactgcaatcactctcaaagaatcggatcttctaaccctgccccaaagactgccaaaattcccattagagcatcctatttttagtctttgcaatcggccttttaaactgcattctacagtacaatgtgcttaactaagtttacccagaagaataaagacgtttccttcctaaggctttaatcctttttaacatagcaaagaattttaagctttcaaatcttatttttcgttcagccctaaatgtaagtctcgcaaacatgcatattaaaaagaaaaggtaaatcttggcccagggggaggataaggaggaatacaactaggcggttcctggcaactaaaaaggtggcggtggagggtaaataagggacgggggtaaataacaaccgcccgcgggaaagcgagcgcaggcgacgggccgccgagcagagacagcgacgcggagtagaagccgcaggatccccggggaggcgagcgcgcgcggagaaattggcgcgatgcgcgacagcagcacacccgccaagagcgggggtgccgggggagccgggggagccggggagccgggggagccgggagggggcggatgcgaagggacccgctgcaactccccgggaggacagcgcccggggaggagcgagcgacggtccccagctccgcgaccgcggcgacccggcggatcccctgcagcccggctgctctcctcacctgggcatccgaggcaacgcgagggctaccggcgggcgccgccgggtctgtttccagccccgcgggctgacatggcggccgacgagctgtcacacagctggctccgggctcccgcggccccggaggctcggacaccaccaggcttcccgccccgcctcctccgcgcgcccctcccggcggctcgcccgaccgaggagcatagagtgcgagcggctagagaggaagcgccgagggcgggcgaccatagagttccaacccggacacacccggagagtccagtccactcataggcgtctgggggcggagcctgggcggaagcggaagctcgggcgttcgcatgctccgttcgcagtgttttcttccgcccggcccagtgaggcggagtgctgtcgcacgtgccatgcggcgcttcttgttcttggcaggagctaccccggccggtggttgcggtgaaccttagagcaggatgtggggcccggcgatggggctgcccccgcggctggcgctgtcagtgtttgctggtcccgctcgctcttgcgttctggggtcgcgaactgcggcgcggaaggactggcaagccaagagccgtcgtggcttctctgacttctacatgcagccgttatttgatcctgagttagaggagtcgcccttttttgcacccaagggtcgctccgagcctacgtgttacgtggcatgcaagaaactggccaagaacctggtacggaacctgctgggctaccacaacccatcccgtcaacttttactggagtgcaatccaggtgagaggggcagaagttttgctcatagcctttacatccctggtttcctaaaccagatttgtttattatgtgcgcgtgtgtttagttcaaaaagcaacttagcgagggtcacttctctccttatgggtctcgatgattgaaatggggtggccaggctagcggccaagcgccgtggctccctgagtgttctcactggccctgaattgtgtgtgtgtgtgtgttttttcccccaagctttcagacagtccatgattcagaagtaagccggaatcttaaatactggtttttattctaaaacttgtgagatttgttgaggaatgtaagtttcgctgtccctgacatcctggaatgcgctgtttctgacctgctgtgggttcaagttaactacgcaatcaattttacatatataaaaggaatcagggggctggagagatggctcagaggttaagagcaccgactgctcttccagaagacctgagttcagttcccagcaaccacatggtggctcacaaccatcctttatgagatcggtgccctcttctggtgtgcagatgtacacggaagcagaatgttgtatacacaataaataaataaataaataaataaataaataaataaattcttttaaaaataaaaagaatcatatctgggaatgtgagattttaaaacttgtctaaaagtctgctttgaaagagaccaggtttgccgagcggtggttatgcacgcttttaatcccagcactggggaggcagaggcaggcagatcgatctctgagttcgaggccagcatggtctacaagagctagttccaggacagcctccaaagccacagagaaaccctttcttgaaaaaaaaaaaaaagagagagagaaagagagaccaggttgttgccagattgtggtacacatctttaatccctgcagaggcaagctgatctctgagttcaaagccagcttggtctgcatagctagttgcagaacagttagggttacatagagagaccctatctcaaaaacaaacaaacaaaaaaaggaaaaatattaagctgggcttggtggcacacacttttaatcccatcactctggagtcagagccaggctgatctctgtgagtttgaggccagcctggtctggggggggacggacggactatgttctatgttgtttattttaaaataaagttggtttttttttttttttctgttaatatactaggacctggaatcctgactgaggcattacttagagccggtgccagagtgattgcctttgaaagtgaaaagacttttattccacatttaaaggtatatttttatgttcctaaagtaatttgctgtaacattcactaactttgagtgggttagagaagtgaaattaagcacataatttcttcttacagacctttagggactatgtctaatatttaaagactaggacccattgagttttcagtgcttgttgagtaactaaaaacttgggagttctgggatctgttttctacttcctactggggcccagaaaatgatacttcaaagtatgacacattgacatgctgagtattttgaaataacagccaattggaaacccacaggtgtagccgtggaaataaggtacctctgctttcctatttctttctttacctttgtccttcaaattgagccatagaaaccagaactcctgttcccacagggcagtcatagatactaggaccacctcatagcaaagcaaaccatgccataccctgtggttattgttggctttctgtgtgagctgcctgtagagatatgaaatgagctatctcatttcatagtagatcataagaccttttcttccagagcccttcccctctgttcagaaggaaggtgtggtacaaacacagaagagactaagaatctggtcagacaggcccggggtctgttcccacctttggttggttagagtagatcacactccttttatgcaagctcatccccacatagctgccattctccattgactgtaagcataaaattggctactttcctctaaatctagataggaccacttgttaaataaattgaagttagtaagtgtgttacgccttccagttggtaacctaccttttattaaatgagtgtagtttgttcccctaagaccaggagggaacatatcacatattccccttcctttacagtatacctgagtgacatatataattggtcactaagcttgtctgctcatttttgtaggctgtgctgtgtccctgcattttgtgagcttaaagttcaagagtgagtacttaggttaggttagcgcgtcagtgtaaactgagttagaacttaaaatgaagcatggagaatgaatgccttgattttaaagtgctgtgtgtcaacaaaaactgtggaaatagcaacagcatctaaagattgagttttttaaaaatgaaacttttgagtattgagtcgtcgttggcctctggtgcagttatgctcagtggtagaacaacaaggtctagggtacaaaccccagtggtgagagtgagtctggcagatgaagtaagtgccacatgcctgcgatcccacaaggctggtgcattagaagagtcattaggttccaaggctagcttagtccacattgggaatttcagatcagacagggctacatagacttttccccaaaaatttgtgagaatgagagggggcaggggggatgccagcgagccatggtggatcaggttggcctcatcctgcttctgtcttctaagtgcctctaatcctatagcatgtgggaggcagaggaatcaccaaagaggtcagcctcttctacatagtaagttctgggccagccaatgctacctagtgagactgtttaaaattccccacactgtccaaaggaggcagctttataaacatggaaagcagttaacaaaaagaaaggaaaatttgttggtgatttttgtttgttttttatttcagcttttttgagacaaggtttccatgtgtgtcctggctgtcctggaactccctcttagaccaggctggctcactcacctgcctctgccttgcgagtgctgggactaaaggcgtgtgccaccgtgcctgtcttggtttattttttaatgtggtgctggtggttgaatccatggccttgtacatgctgtatgagttctgtcctactgagctccacaggctcctggggaaggttacttgtgtttcagacctcttagaaaacttccactttgatcattttttcctgcagtaattgacttttagtgcctctgttaaatttgaggtatattaatatttgtaccttcacataaaatctttgaattttgggctggagagatggctcagaggttaagagcactggctgctcttccaaaggtcctgagttcaattcccagaaaccacatgatggctcacaactatccaaaatgagatctggtgccctcttctgatcttcagatacgcatgcagacagaacactatacataataaataaataaatctttaaaaaaaatctttgaatttcttattgtgttcgaggtgctgtaaagcctccctgggccttgtgcatttttggcagatgttctgtcattaagctttatacattcccagcccttggattttttttttaactcttttttttttttaaactagtttatttaaatttattttatgtgctttggtgtgaaggtgttagatctcctggaactggagttgtagacagttgtgagctgccacgtgggtgctgggaattgaacccaggtcctctggaagaacagccagtgctcttaaccactgagccatctctccagcccacccaacccttggatttttaagaccagctctcactgtatacaggctggtcttaaggttactgtgtaacccaggccctcccagaatttgtaattctcctgtctccctttccttagtgatgagattgcaaacttgcctcagtgtgctcagctgttttaaactttttcttattttttgagatagagctgtgggttgtaacacggtgtacatgacgagatctctgatgtcacttccttgtcccttcagtctttaaggatgcatttggatggattgctgcaagtggttcacagtgacttctttaaaattgatcccagacatcaggaagtggtaaaaccagaatataattcacgtatcatttttaaggatttgggaataaatccagttccttggtcagcaggtaatttttgccattctttaaagctaatttctttatagacagcattttctttaccagtatgggtcatctagatatgtatgtaatatgtaatgaggtttagattgttcacttagtaagcaactgctcttagactaaacatgccagttccttttttctgcatataaattaccattttatttctgtacaggacaagttgtttattaagggggacttagttattgaattgtaagtgtatatattcattgtacatgggactgtacttaagaattttcatataaatatatgtttaaatatgtgttattcatataaagtctctcatatcaccttgtcttagggtttctattgctgtgaagaaacaccatgaccatggtagtcctttaaaagaaaacatttaattgattggtggcatatagcttcaaaagatttagcagattatcgtcatggcagggagcatggtggttggaagaatggtggtgtgcaggcagacacggtgctggagagttcaacatgcagatccccaggcagcaggaagtgaattgtctcactgggtgttgctgaagcatagatgagacctcagagcccacctccatagtgacacacttcctccaaaagaccacacctcctccaaaagaccacacctcctaatagtgccactcccaaaccaccaccacacaccttttttatttaaaattctttatatatttattttttcctagtgtctcctccttctgtcattgctataggcaactgtcttagggtgactattgcggtgataaaacaccatgaccaaagcaacttgagaaggaaagggttaattttgtgtaaattcacacatggaaggaaattaggacaggaacttggtgtcaggagctgatgcgggggccatgaagaagttcttattggcttgctcctccttgctcagcctgctttcttatagaacccagaacagtcagcccagggattgcaccacccacaatgggctggacattaccccaacaatcactaattaagaaaatgctctatagtttccctacagcctgattgcatggaggcattttctcaatggaggcttcttcctttctgatgactctagcttgtgtcaggttgacttaaaactaaccagtacagcaacttttgtgttcttccttttttcctctttatgtatgtgtacatatatgcttatatatttgtgtacatgtatgtgtgtgtgcgcacatacatgtgcgtgtatatgcatgtagaggccaaagtttggtgttgagtgtcctcctcaatcgccccctgtctgtcactgaacctggaacctatttaggtagactggacatcaaaccctgaggatctgggatcaggttcttctgcctgcacagtaaactcttctgaccgagccctctccctagctccacgtacagtttctcattttacttcactagtagacgagacattctgggggccgtttacccaccttttctaaaggtgtcacccagctgtcatcagtcatcgtacctgtaactgaaatagagttaccattgtcaccttactttgcatcagtaaaatgcgatcataggaaaaagttttaagaaacgatgcaagtttgtttttgtatccctaacaggtgttcctataaaagtatttggaatcctaccaactaaattagaaagacgaatactttggaaaactctatttgatctgtattcctgcgagtctatatacagatacggacgaatagaactgaatctgtttgttactgaaaaagaattccaggtgggttgtcaacaggtgactggtattgctactgtgagagagtgctgtaaagaatgctgtagtcttccgaggagcgtcagctgaaattttaatttggggccttgacatttgagagttttaattattgtacaatgtacagttcagtggcattaagtacaatcatattatatatccaagacttgctgtctagctccaaaattttttgcttatatgtatgagtgctctgtctttctggcattagatcctgttacacatggttctgagccactatgtggtggctgggaatcaaactcagaacctctgaaaaagcaaccagtgctcttaaccactgagccatctcccagcccatccaaaattctttagatagtccactgaacacttaactccccaagttcccatttcctcggactcttggaaccattatcctggcatcatcttgtgagcttggctttgagtcataactacatttgtccttttgtggctggcttatttcacttagcatggtatcttcaagtttcatgataaagtgtgttgaaatttcattttttttttcatttttagctgagtattattctgctatatgtactcagtaaatatgtattcatccatgaaagaacacttgacttcttccacctctaatattaccaataaaattgccatgtacacaagtttgctttcaggttgtgacagggatggtgtgcaggaggatatgtaaaggcggagttatcctctgatatcactgttcaggagccgtctgcttcttccatttgctttttttttttcctgtctttattttacttattcactgatctgcttatttgagaaggatctctccctaggaaatttcgtttgcctctgcctccgagtgatgagttacagacgtgagcctctgtgcctggcttttccattggttgctgagaaacacgctcaggtcctcaggcttttgtggcaaaccctgtaacacctgagctgtctccccagcccccgcattcagggtattgattcatatatttagaacttggattgtttgtgtggtaattctacatttaatttttaaggatgtgccatactacttttcttgctagatacactatttcccaactgtcgtgcagaagtattccgaatttttcccctatcatacttgtgtttgtttgtttatttaattttgtgaggttctttttgtttgttttgatttgttgttgcttgtttacttgttttttgagaaaggattttctgtgtaacaaccctggctgtcctgggcgtgctttgcttgaactcacagagatctgcctgcttctgccttccaagtgctgggattaaaggcatgcaccaccacatccagctaattttgtgtttcttattagtgtgtcgatgtgggtacacacatgccacaccatatgtgtgtgggtcaaaggtgtgttccagggatggaaccgaagtcagcaagcttgcccagctgcatcagctagctggccctttcttggtgtttttgatactgtctcgtaattggatgaagtggtgtttcattcattgtgtttgtgttttcctaatggctagttgtgttgaacatagtttttatttacttaccaataattggcatatcgttcttgaagcaaattctaccaaaatcttttgttctttttggtttttcatcaccctgactgactttatctttgatatgagggtatatcaacacttctttccactaaaaatagaatacaagtcccaataaatcatcagaggaggttgattttatagacagtggagggcagaagaaagttaaactaaaactcaatagctgctgcttggtcattttacaactatattcctaaagcagaaacagggatagcaaacaattgaaaagtagcaaattggtcactaccaggttctttccgatgacatttgttgtatgaggatgaatttggagggattgtcattatcttggcaagttgtgcctggcttgtttgggaactctggctgtccctggtttctggaaaaagtaaataaagaacatgggttcaccttggtggtgtggaactcaagtctgagtggctccagtttgactttagtctgctctttgggagtttggtgcagggacagcagcctctgcttttctcctttttagtgaaaaggcatcctgcagccctaagcgatgctgtttgaatctgctaatggatcaatgcttcctgtgcagagctttgctccagtgtaattgacagtgcacatttgtacataaaggaaccctaggaagggataatggtccaagagataagggaatgtgtcctcacccagatagtaaattactggctagccaggcagaatgagagtagacaatagatatataaatatatacaatgtataaacaaagaaatgagagccaagtatgtaacagtgctcatcaggatataagttgccacaatggccaaatctgtgatccaactatttgggaggcacttagtaggatccaactgtttgggaggcacttaataggacagggagaaggaccagaattcaaggtcatcctccagtgtgtagttgcagaccagcttgggctatatgagacccaaaattttttctttcttacagcttctttaacatggacttttccatggggtcctttctcagtgataccttccattcactgatggtatcatccttaatgtccagcaagagtcagctttgctgggccatggtggtgaacccctttaatcccagcacttgggaggcagaggcaggtgaatctctgagtttgaagccagccatgtttacagagtgagttccaggacagccagggcctcacagagaaaccctgtctcaaaacaacaacaaaactatttattttgtggatgtgtgtacacttgaattcactcacgctcaccacactcacgtggttgttaaccatgtgagagtcagcaaaaaaaaacttgcaggaatcatttctcttttcaccatgttggtcccagggaattggactcaggttgtcaggcttggtgaccagcacttttacccagtaaaccatctcaccattcccagccataatgattcttttttttttttttaagattttatttattatgtatacagcattctgcttccatgtatagctgcacaccagaaaagggcatcagatctcataatgaatggttgtgaaccaccatgtggttgctgggaattgaactgagcacctctggaagagcagtcagtgctcttaacctctgagccatctctccagccccctataatgattctcgatgcacaatttagtagctcacctaatacataattctagcatacctatctttctccatagtacatgctattctgttatgttgttgaatccatagtgtaggaattatttctgtcttaattgtgtctgtggcaaaatgatgagtttttcctatttgtgtttgttcgtttttgaaacagccttgctctgtaacctgggctgggtatggaatttgctatgtggcccaggccagccttgcactcaaaggaaccctgccttagtcttctaagtgctgaggtaacaaggtatttgctaccatgtctggtcattacagattttttattttagttttccttaaataagattttcccctgaaacgtcacattattaaaagtagtcacattattaaaagtaatttcatatgtattttttgagattttgtttctttttatttcatacacatgattgttgcctgaatgtctgtaccatgagcatgtagtctttgagagggtcagaggaggtcattagatcctctgggtctgcagttacagacagttgtgacatgtcatgttggtcctgagaattgaacctgggccctctggaagagcatcagtgctcttaactgctgagccatctttctggcttgtggtttggttttgtttatatttttatttagatgtatgtatttatgccgtgtgtgcttgtacttcacagaggctagtaggttttggagctagtgttacaggcttgacaattcttgatgcacaatttaatagctcacaattgtgagttctgagtggccttttgtctgtgctaggaaccaaattccagttctcaggaagagcagcaagtgctcttaactacccggctcataaacagtcaattttatatgttgataccacatgttttcaaaaaggaaaactctacttggaaatacttattgttaatgttttatacttagtcctcatctttttggtttgtttagatagggactctgtgagtagtcctgtcctggtactcacagagatccacttgcctctgcttccatagagttgagattaaaggcatgtgccaccacacctggccagttctcagcttttcatttaaatttctagaagctattaagatgttaaaagttaagatccaacatttgatttgattatatctatgtagcataatttgtctattttcttttttcaccagagactaatcgcgactcctaagaggccagatttatatcaagtattgagtgtgctttggcaagtggcttgtgatattaagtttattcacatggtaagtaaagtctcagatgccaggagaactttataactcagagactggtaagcacataccatgcactaacggttaatttaaaagattaatttactaaaagatttaatttcattattttccaacttgtttagttgttttgttttgttttttgagatagggtgtcactgtgtagccctacctggtctggaactccttatgtaaatcaggcctgcctcagattcacagagttccctctacctgagctctatgactgaaggtgtttgttatcaccgttgaagggagattaaccctgacacttgtttgccaccttttttctctagtcataaaagtcatataactagctcatgatagaactaggaaacatgctgagtggtggtggcagcagacacctttaaaaccagcactggtaggcagaggcagatgaatctctgggagttcaaggccagtatgagctacagatctaattccaggatagccaaggctacacaaagaaaccctgtctcgaaaaacaaaacaagcaactaggaaacttggtttgtttgagacatgctctacaagaaggacattttgtgaatcaatactgtagttctatagcccagaaatctctagtgacatagatgacatacttctgcttttttatgcttttcttgtctttttgggttttttctttaatatagtgaatatttctacattgctttgttttatgagacagtttcatatgtaagcattttgactaatgagaaccaactaacacaattgagaagccttaggcctcatttaagatctgtgtaaacttaagagactgtcctggggttgaagagatggctcagttggtaaagtgcttataatttagtgcaagtatgaggacctgagttctgttcctagcatccatgtgaaaaaagagcccatggttctaatatcagagctcggggaggcagagacagaatgatccttggggcttgctggccagctggtcctacagaatccataagatccaggttcagtaagagacccttactcaaaagtaacgttgaaagaatgaggaaaacacctgaaaacaacctacaaccttcatgtccatgtgcatacataccacacagacctaccaaaaaaaaaaagaaaataataccttgtctgtctttcttcctccaggaaccttggtcatcatttagtatgcataacgaaaatgggtcctcagagaactcaaagcttggggtaagaacaaaccgtgccattgctgttcatcacacttgcagcaagtggcttgaaggagtaaggaccaatgcttcaccctgttattgttcgagactgagaaaaattattttcttttctgtctaggaatcgttgaaatcaatgaaacaaaatctatattttattcagttgactcctcgtagaactttatttacagaacacctaagtccattgaactatgatatatttttccacatggtcaaacactgctttgggaagcgcagttccccaataatacaacatttacggtaagtagaaattcaacactataaaagtagtgatttaatgtaactatctactgtgttataaggaggtttttcacattgttatttagagtaaggtgtacctgtgtttcttacctgttccaaatagttttctaagtttccaccagctgctggggttctgctgccacttcagggccccccaataacacacagtcttatattagttacagtgcttctggccaatgactaggatttcttatttgctagctcagtcttaattatcaaccaaaactactaatttatgtatttttaataagtacttatgcatcctctcctcctggaattacatggcctcctctctttactacatttcccagaatcctcctcctctccttgtctcgcctatcttgcttccctattggccaacagtgttttattcattaaccaataaagagacatatacacagaaggacttcccccatcatacttccttctggactggggagatggttgagaagtggttcacaaatacctgtaattccagtgcctggggctccagcacaataccccctactttgcctctgtgggcaccacacacatagcatgcacatacctacccatgagatacaatctaaaaagcatcaataaaaacacctttctgccatttgtacattattttccacatctccctctgacctcgtattcatctttaagcagcacaatcttggatactcgaaggctattgtgtcctttttcatcttatgtttatttgttttttttatgtgtacacacatgtgctgttcctgtggaggccggaatagcatttgcatcccgtggagctgcagttacagagctgcttgacataggtgctaagaactgaacacagagccatctctccagctggtggggcatattctccattcaccttgtaactagcagtcactaaagtactgtcagaagatggaaaaagtgttaaaatggttattttaattaaccatcatttaccctataaccttaatggttctgttgactagaaatatttattttagttaatttacttgtttagttatttattttgagattggattttaggtatcccagactattttaacttttggtacagttagagatgactgaacttcttactctctggtctttacttccttgggattataggtgctatatgtgcactatcacactgtttacatataaatagtaaacccataatctcaactcacaggaccttggggctgaagaatcagtcacatgagttcaaggcctacaatgtaaattccaaatcagactgagttacagagtgaaactaactttaaaaaacatcacacggggctggggctggagagatggctcagaggttaagagcaccgactgttcttccagaggtcctgagttcaattcctagcaaccacatggtggctcacaaccatccgttatgagatctggtgccctcttctggtgtgcagatatacatggaaacagaatgttgtatgtataataaataaataaaatcttaaaaaaaaaaaatcacacacattgtggtatatgcctttaatccccagtacttggtggagcagaggcaggtggatctgtgaacttgaggctggcctggtcttcatagtgagttccagaccaggcaggtgggaccctatcaaaaaataaaaatgataatatgtaaactagaatttttgtgagaattgattgcaccacgttaaacttaaattggtggttagctatgaaattttaggaataactgcccagtctcttgagtgctgagattataggtttagcatttattttatgtaaatatttcttatccaaaccaagtatggtagtatatacctataatcccagtacttgggagttaaggtaggagttcagagtcatctctgtacagagagtttacatatattatatatataaagtctgaaataaatttaattatgtatgctagtcattttaattgaacttagcaggtggctgtcttggatttaactgatggttgttgtaaaagggaattaagcatgttttcttgattttccttttcagttctctgagtactgttgagcctattgaaatactgaggaaggtgagaataaaacctggagagacaatacttagaatgtatcctcatgacttcaaaagactttttgaaatgatagagcgttctgaagactgtgtctttaaatgggtctatgatgagagcttggaggacattgtgctctaggaaagcagtctatgagccatgaactgcagctgcttatctatttatttggaaataatgagacaaatgaaaactgagtttcaagaagttcatgcactttgaacagaagagaaactgtccttgcttggcacaaaggaggaaaataatttcttctgcagttgatacctttgatgcactagaagaaacagtagttgcacttttatttgaaattgaataaaatggaaagttgtcggtttgatcagatcacatttgttttgttttaaactactctctgctgtagatcaatggtagaacacataacctagtagtccaaggctctggttttgctcctcagcacaggaaccctttaaaaaaaaaaaaaaaaaaaaaaaaaaaaaaaaaaaaacctatttactgtaaaggtcagtagggttaggttattcccagttgtaatttctttactttttacaaaatctctttgtcaaacatctttaaatatcgaagttttcactgttgccaattgcttgtgtcttcctccagtttctgtactgttaaacttagaaaagtcatggtggtgcaagtcctgggacctggaaggtagaagacccatcaggtcaatgctagtttcaactgtatagtgactgagagcactttaaacttatttcagaaagggattagtttatgtgtcaatatgttgaaatggattatcaggtactatacaatgtaaagtttaaatttaagtatgttataacttttttagaaataaaattttttacatagtattttataattttttttgtctctaaattcgtaagagaaatattaaggggaccctagacttattcaccttagttgtgtcatacgtagtgagtgtgctttcagggagaagtctgtgtgtaactgaagtctgaggagctaagtgcaatggtgtgcctctgcagttgcagcagtggctgaggtggaaaggttgagtggacaagagttggagaccagcctgcgtgctggtggggtcagggacaggtaaagtgtttatctaatgcttatcaagaaagcttaggagtcagatattggggtaaaaatctgagtgaccagagatgtgatgaagaagccagcagtgagtgactcctctctctcctttgttcctaaaagggttgagactgtctctaagcccctccctactacatcctgtgtctctatctgtcctcagtcctccaaaacctcagtggttaattttgctcagttagtagctagctcctccctctgattcaaagcaagctttattggaagcctggggaatgtccaaatgtgttcataatatcacacaacaaacaggaaagcaagatctcagcaactcctgtctgctagggaggtgacgtaatggagttcactgtacaatcgtgaggatctgagtttgaatgcccagcacacctgtaaagctgtgcccagtagtagaagtatgaggatgagacatggagagggattggctagctagacagttaaccaaattaggagctctaggttcagttgagaagactctaagacacccagtcccttcaaatgtcttaactctgtcttcagccatccattctgtacatggaatgatctacattagctgtacatttgattttgagtgactgagctgattgacatgtagtaagccaaagaacacatagcaaccaggcagtggtggtgcacgcctttaatctcagcgctttggagacaggggcaggcagatctctgagtttgaggacagcctggtctacagagtgagttccaggacagccttggctacacagagatacctgtatagcctgtctgaaaaaacaaaacaaaacaagagcaaatatcagataggaaaacatctttagattgcagcatcctgaccaggagaacaagcaaaagtaacagaatcaaaccaggcacttcaacatccatcataaatgactaggaaggccctcgatggaatagtggagtagtagagttttcatgcttgagagatttccaggcagagggctttctacatggaccagcattctggtctcagcttctcattgctggcgtttttagatcatgataaaagttacctcttttggaaatgctttgccctctagctgttctcaagagtgtggtgttttgaacccagccatagccttcacagggactaatggagttagaagacttatgtcccaaaccacaggatgccagccaacaggtcacaatgccatctggcatcatgcaaaaggaaaaaaaaaaatccaaagataactaaaaagatggctaactgcttgtcatgtggtcccaatcaaaagactgaatcaggaacattacacccactatatcaacagagctgcaattgatgatgagccatttatcttctaaagattactctctcacgttttgaaggaaatggaaacttctccaatgttggcaatcagattgctgaccctgatgtctggaatgtagatcatatgcatcgttttccttcatttgttcttgaggcttttgctccaaaaatgctggttttgaactcagagatccacctgcctctgcctccaagtgctggaattaaattgcccgtgccaccatcaccacccagctatgttatatataattttaaaggtcacatccaaaggagaaagcaagccacctacaaactggcattatttgtttatttcttggcttgtgatcacccttaatttgttgatgtagcaaacaaatttcaactctgctatgcaaatgacagaaggaatctgctcagcaattaactttagagttcaatttcatacatgcaacattctatatgtgaaaaaattactaactgaactacaggtattaaatactgaaaaaagttaatagtttattataatttattttatttaacaatctaggaagttcacagccatcagcagttccagtgcaatttcaggtgcaattgggaattcaggaatcttggtggagctgttagtgtagcagactttgtaggtgaaatacatgcacactttcaataacacatgcaaagggatctctctaaaatcgacttcattgctttcattctcagcaaactgcccaggtccactcaacatggcctttattgttcctgatgttaacgcatgttctctttttacagtaaattgatggccatcagaagatattaacttgacatacatggcatcagggccttcacagccaccgtaggttttctcctctccatccattatgttcttacaaaatcctactcgatcccacaggaactttagtagtttcctgtcgagacagaggcacagtctgccagtaactttcatgcaaaggaagtatgttgtattctctcgactcatcctttcaaatgcttggattaaaagggtgtatcaccaaggtgaacccagagtccatgacaatttacctatatgatttatactattttattactttcatgtaaatctttctagtatctatttctttaatctgtttcttctacaatttttttgatcaattcttttttttttctctttggtttttgagactgtttctctgtgtagctttggagcctatcctggcactcgctctggagaccaggctggcctcaaactcacagagatctgcctgcctctgcctcccgagagctgggattaaaggcattcgccaccaacgccccgcttttttgatcaattcctgatcaacaccaggcttgcctgagctttcttaactcagttacaccttgtgataataacctataacatcactaactactggcaatttatggtttcccaaatcttagcactagtgttgatcaagaattaatgatgaggaacttgaaacccgtggtggcacatgcctttaatccagcacttgtgaggcagaggcaggaggatctctgtgagttcgaggccagcaagtctacatagcaaccatgaattcttgatcaataccagtgctaagctttgggaaccatattctacctattggctgtgaagagacaccatgaccatggcaactcttctaaaagaaagcattttagtggggctggcttacagtttcagaggtttaattcattctcattatggtaggtagcatggcggcatgcaggcagacatggtgctggagaagaagctgagagttctatatccagaaccacgggcagcagaaagagaaaaccactgggactggcttgggcttctgaaacttcacagcccatttccagtgacacacttcctccaatccagccacacatcctaatccctctcaagtagaggcactctgtgataactaagcattcgatatgagtctgtgggggccattcttattcaaaccatcatataccatcaattcttttaagattttatttttacctctgtgtatatgtttgggtaagtttatgccatgtgtgtgcaggtcccttagaggcctggagctgcctagcatgggtgttgggaactgaactggggtcctctagaagagcagcaagaattgaacctctgtgccatctctctatcctttcagcaagtctttctttagtttctgtggtttttgtttgtttgtcaaggcagagtcttactctgcaaccctggctggcctgggacttgctacttagaccaggatggccaatgtctgctgggtggtgttggcacacacctttaatcccatcaagataacagaagaggcaggtggatttctgagttcgagaccagcctggtctactacaagttgtagaacatccagggccacacagaggaaccctgtctccaaaacatcaaccaaccaaatgaacattggtagtacaggattatatttcaagaagccagggatcacatgtgctctggagttagagagctgtctgggcagtatacactgcagtgagagttgttccctgaaaaaaggctgggcatggttactcgaacttaaaattttatacttgaaaggctgccacagaattattgccatgaatttgagacaacattgggcttcatagtgatttcctgcatatctaggctagtgtaggaaccctgtcttgagaaacaaaaacaaaacaaaaacccttcattattagttatcagaatggagtcaactaagcaaacttttaaggattgggcagatggttcagtgggttaaagtacttgccacagaaacctgacaacacgaatttacaggcccaggtctcatgtaatagtcatacatggtggcacacgtctgtaatcccagtactcctataataagatgggaggtgtggccagctagcctggaacactcagtgaagcggaaaatgagaccctacccctcaaacaaggtacaagtcaaggactgacaactgaggtgccttggcgtccatacacctccagcagaaacacacacacacacacacacacacacacagacacacacacacacagcacacacagacacagacacacacacacagacacacacacacagacacacacacacacagacacacacacacacagacacacacacacacacagacacacacacacacagacacacacacacacacagacacacacacacacagacacacacacacacagacacacacacagacacacacacacagacaacacacacacacacacacagacacacacacacagacacacacacacagacacacagacacacacagacacacacacacacacacacacagacacacacacacacacagacacacacacacacacacacacacacacacacacacacacacacacacacacacacacagacacacacacacagacacacacacacagacacacacacacacagacacacacacacagacacacacacagacacacacacacagacacacacacacacacacagacacacacacacacacacagacacacacacacacacacagacacacacacacacacacagacacacacacagacacacacacacacacacacacacagacacacacacacacacacagacacacacacacacacacagacacacacacacacagacacacagacacacacacacacagacacacagacacacacacacacagacacacacacagacacagacacacacacacacacacacacacagacacacacacacacacacagacacacacacagacacacacacacacacacagacacacacacacacacacagacacacacacacacacacacacacacacacacacacaccactatcacaaaaacaaaaatctagaaatgcaagcatagcttgaaagaaaagggagcagggaggatgcaaagaccgcttatcaggtaaaggcatttgctgccaagcacggtgaacagaggggaaacattttgttgtttgcttagataaacaaagttgagtatgaatactgttataagcaggcaaagggtaatgaattaattctcgaaggggctgtattctctaagaaaccacagtatcacttccgacagaatggaagggagaaccgaggacaaacacctgcagtaacggtttaaacaagttcaagagaaagagcaatggagaaaagtgacggaggcccttgcttgggactgggagaagaaagttgtgaattactgtgctggggctttgaacagcgggtgtggagcagtgggggaaatggacgagaacatcaacagagaggtgactaagggcacagctccaggtctgtgcactgggctgagcctcatcagctgtaactgagtatttaaaacttgcaaacagaattcacgggctctgggaatgtagctcagttataagagcgctttcatggcatgcgtgagtccctgtgttctaggaccagcaccagaggaaatagtcaaaatccaaagaattggggctggggagattgctcagtggtcaagatcatattgctcttgcaataatgcatgaacgtgtgtgtgtgtgtgtgtggtcaaatctggaatggtgagatctttcccaagggaacaagctgtggtggtaacttcattgtaatttcagtgctgggttatgttgagatactcaaaaatttgctttttggttttgttttgtttgagtcaggattctctgtgtagccctggctgtcccggaacttgctcacagaggtcctcatgcctctgtgtccccagtggtgggattcagaattttgtcttgtttttggtttttcaggacagggtttctctgtgtaacaaccctggctgtcctggaactcactctgtagacaaggctggccttgagcctgactctgcctccccagtgctgagattaaaggcatatgttaccaccacttggctgaaaaaaatgtttttgtttttgtttttttttttttaaagaggataatgtatgactaacctgttcatttggctccctcagatctgatgaatttagtacactgttcaaataggtatctaaggtgtcgattcttggccttttgtcttgagatcgagtggagaagctggactggtatctcatgtttttccatgctggagagatggatcaatgagataacccctaggaactcacaggctggctactctgccatgcacagtggtgagcaagagaatctgtctcaaatgaggtggaaggcacaacactgaaacccaattgtcttctgattcccacatacatgccttttgggtacacatactggagtatgcatgcatcaaacatactctctctctctctctctctctctctctctctcacacacacacacacacacacacacacacacacacacacacacacacacagagagagacagacagagacagagacaaagacagagacagagaaggaaaattgtttgtctatttgtcctggaattccctctgagaaaaggtgtgtgctggggtcaaaagaaaaatgttttacctaggaaaatgaaatagctgtctgcacaatttacttctagataagatcaaggtgctgaaagatcattaagagacctaaaggcttgcatcattcctggaggagactccttcagttgtatttaatgatacttttgtttgtttgggaaatgcccatagtttgtactaggaaaataaatgatgcacccaggagtggtagctcatgcctgtaacctctcaacaagataggtgctttagttaggtgttaatattgctgcaataaaacaatataaccaaaaacaagctggggaggaaagggtttatttgtcttatatttatacatcatagtctgtcattgaaggaagtcaggacaggaactcaaacagggcagggacctggaggcaggagctgatgcagaggccgtggaagagtgttgcttactggtttgttcattgtggcttgctcagcctgctttcttatagaacctaggacgaccacccacaataccctgggtcctccctcatcaatcactaattaaaatatcctacagccagatcttatgggggcattttctcaattgaggtttcctccttttggatcactctagcttgtgtcaagttgacttaaaactagtcagcacagtaggcaagtctaggaatagtatggcaacctgggttcctgcttgtctagaactacacaaatgcagttcccccacaagtgctcctagaagctagagagccctacctccatcactgtgcacacacacacacacctctccaaacaaagcaataggttgttctgacctgcttctagcagcctcttagtgttggtagcctttggaaggcaggcactcatggaaggaagtaaagtctttggaagagtgccgttgaaggggatgttgggactctggtctattctcttctcttgtgtttcatagcgaccattgttagacccccgaaaactcaagtatccggggtctcaggccaggttcgcggtcaccccaatcaccaggcggattcgagagcttgctgcaaactgcacgaggctttattgtaatttaacgaactaaccccatgttagctcgggtctttcaacccccagccatggcagacggctagaaaaagacggctcctannnnnnnnnnnnnnnnnnnnnnnnnnnnnnnnnnnnnnnnnnnnnnnnnnnnnnnnnnnnnnnnnnnnnnnnnnnnnnnnnnnnnnnnnnnnnnnnnnnnnnnnnnnnnnnnnnnnnnnnnnnnnnnnnnnnnnnnnnnnnnnnnnnnnnnnnnnnnnnnnnnnnnnnnnnnnnnnnnnnnnnnnnnnnnnnnnnnnnnnnnnnnnnnnnnnnnnnnnnnnnnnnnnnnnnnnnnnnnnnnnnnnnnnnnnnnnnnnnnnnnnnnnnnnnnnnnnnnnnnnnnnnnnnnnnnnnnnnnnnnnnnnnnnnnnnnnnnnnnnnnnnnnnnnnnnnnnnnnnnnnnnnnnnnnnnnnnnnnnnnnnnnnnnnnnnnnnnnnnnnnnnnnnnnnnnnnnnnnnnnnnnnnnnnnnnnnnnnnnnnnnnnnnnnnnnnnnnnnnnnnnnnnnnnnnnnnnnnnnnnnnnnnnnnnnnnnnnnnnnnnnnnnnnnnnnnnnnnnnnnnnnnnnnnnnnnnnnnnnnnnnnnnnnnnnnnnnnnnnnnnnnnnnnnnnnnnnnnnnnnnnnnnnnnnnnnnnnnnnnnnnnnnnnnnnnnnnnnnnnnnnnnnnnnnnnnnnnnnnnnnnnnnnnnnnnnnnnnnnnnnnnnnnnnnnnnnnnnnnnnnnnnnnnnnnnnnnnnnnnnnnnnnnnnnnnnnnnnnnnnnnnnnnnnnnnnnnnnnnnnnnnnnnnnnnnnnnnnnnnnnnnnnnnnnnnnnnnnnnnnnnnnnnnnnnnnnnnnnnnnnnnnnnnnnnnnnnnnnnnnnnnnnnnnnnnnnnnnnnnnnnnnnnnnnnnnnnnnnnnnnnnnnnnnnnnnnnnnnnnnnnnnnnnnnnnnnnnnnnnnnnnnnnnnnnnnnnnnnnnnnnnnnnnnnnnnnnnnnnnnnnnnnnnnnnnnnnnnnnnnnnnnnnnnnnnnnnnnnnnnnnnnnnnnnnnnnnnnnnnnnnnnnnnnnnnnnnnnnnnnnnnnnnnnnnnnnnnnnnnnnnnnnnnnnnnnnnnnnnnnnnnnnnnnnnnnnnnnnnnnnnnnnnnnnnnnnnnnnnnnnnnnnnnnnnnnnnnnnnnnnnnnnnnnnnnnnnnnnnnnnnnnnnnnnnnnnnnnnnnnnnnnnnnnnnnnnnnnnnnnnnnnnnnnnnnnnnnnnnnnnnnnnnnnnnnnnnnnnnnnnnnnnnnnnnnnnnnnnnnnnnnnnnnnnnnnnnnnnnnnnnnnnnnnnnnnnnnnnnnnnnnnnnnnnnnnnnnnnnnnnnnnnnnnnnnnnnnnnnnnnnnnnnnnnnnnnnnnnnnnnnnnnnnnnnnnnnnnnnnnnnnnnnnnnnnnnnnnnnnnnnnnnnnnnnnnnnnnnnnnnnnnnnnnnnnnnnnnnnnnnnnnnnnnnnnnnnnnnnnnnnnnnnnnnnnnnnnnnnnnnnnnnnnnnnnnnnnnnnnnnnnnnnnnnnnnnnnnnnnnnnnnnnnnnnnnnnnnnnnnnnnnnnnnnnnnnnnnnnnnnnnnnnnnnnnnnnnnnnnnnnnnnnnnnnnnnnnnnnnnnnnnnnnnnnnnnnnnnnnnnnnnnnnnnnnnnnnnnnnnnnnnnnnnnnnnnnnnnnnnnnnnnnnnnnnnnnnnnnnnnnnnnnnnnnnnnnnnnnnnnnnnnnnnnnnnnnnnnnnnnnnnnnnnnnnnnnnnnnnnnnnnnnnnnnnnnnnnnnnnnnnnnnnnnnnnnnnnnnnnnnnnnnnnnnnnnnnnnnnnnnnnnnnnnnnnnnnnnnnnnnnnnnnnnnnnnnnnnnnnnnnnnnnnnnnnnnnnnnnnnnnnnnnnnnnnnnnnnnnnnnnnnnnnnnnnnnnnnnnnnnnnnnaaaggtagttttatggcaagcacgtgttcggcttttagggctgccaaaagggaagccggttccttcaaattgagacatcacagatgcccaaggacaagaattacgacatgactaaagttgttaaaccatacctctaagagagatagagaacaagaatgtcctggattctctcagctggcaaataggaaagtgctgttccagctaacctcacattaaccttaaagcatgcctattcttcacttgccagcctactaacaatagatctgtgtctcaaagttgtcaatgggcactgtgccctccccatatctggtcatggtgttgctcctatggccttggatccttgtgttgtcatggtaaatggctcatctccttatcgctttctttaggaatgtgcttttggccaatgagagaaatttctttatcacttcaaggctcctgaaggagaagagtttttagaatagaagaagcttgaagaagaagcgtggagaagttagaagtagaacaggaatattggagtacaaacagaataataaagagcacaatagaggatgactctcagattgtgtgagaagttactttagaaatcttttaccccccccttccctgctgagaagcatttcacctttggagataattttttttctctattatttaagttttttatattttttttttattttttagttaacataaaaattttgtcaaagtcccttttataattcttaataactttaaggccatnnnnnnnnnnnnnnnnnnnnnnnnnnnnnnnnnnnnnnnnnnnnnnnnnnnnnnnnnnnnnnnnnnnnnnnnnnnnnnnnnnnnnnnnnnnnnnnnnnnnnnnnnnnnnnnnnnnnnnnnnnnnnnnnnnnnnnnnnnnnnnnnnnnnnnnnnnnnnnnnnnnnnnnnnnnnnnnnnnnnnnnnnnnnnnnnnnnnnnnnnnnnnnnnnnnnnnnnnnnnnnnnnnnnnnnnnnnnnnnnnnnnnnnnnnnnnnnnnnnnnnnnnnnnnnnnnnnnnnnnnnnnnnnnnnnnnnnnnnnnnnnnnnnnnnnnnnnnnnnnnnnnnnnnnnnnnnnnnnnnnnnnnnnnnnnnnnnnnnnnnnnnnnnnnnnnnnnnnnnnnnnnnnnnnnnnnnnnnnnnnnnnnnnnnnnnnnnnnnnnnnnnnnnnnnnnnnnnnnnnnnnnnnnnnnnnnnnnnnnnnnnnnnnnnnnnnnnnnnnnnnnnnnnnnnnnnnnnnnnnnnnnnnnnnnnnnnnnnnnnnnnnnnnnnnnnnnnnnnnnnnnnnnnnnnnnnnnnnnnnnnnnnnnnnnnnnnnnnnnnnnnnnnnnnnnnnnnnnnnnnnnnnnnnnnnnnnnnnnnnnnnnnnnnnnnnnnnnnnnnnnnnnnnnnnnnnnnnnnnnnnnnnnnnnnnnnnngcctttcttctgcactgaggttccttcaccatgaagtgaggacttcctctgacctttgcatcctaaatgctgggattataattctgtgacgtcatgtctggcttacttgtgaaattctaaagcttctagactagaaagtttttccttggccctcagcctaagaaaaagctggagaatggaaggtaacacagaagaaggaggaggaggaggaggaggaggaggagaaggagnnnnnnnnnnnnnnnnnnnnnnnnnnnnnnnnnnnnnnnnnnnnnnnnnnnnnnnnnnnnnnnnnnnnnnnnnnnnnnnnnnnnnnnnnnnnnnnnagagagagagagagaccaagcatgccatgggcttttgaaacctcacagcccacccccagtgacacatctccttcactacggtaaggccacacttcggacttctaaccaaagaagttccactaactggggcccaatcctaccacaggcttgtatttttaaatcaatgtaagaaagtaattgggactagagaaatggctcagtggttgagagcactggctgctcttccagagggatccaggttcaattgccagcacccacacggtggctctgtaactccaattccacaggatccaatgccctcctcttacctcagaagacaccacacacacacacacacacacacacacacacacacacacacacagttcccccataataaaagtaaattaaatgtttaaaaaattttaaaaagggaaaaagaaagagaataattactgaaatcagcatgttcctgaagtgatgtctatggttgataaccttgaagctacaaagctgtaccttaagattattagaaagtgaagaattttgtgtttcatgtgcagtaaatatataccatatcactgtaaaatttaaagaaaaagaattctagtttcctagaaaaaagttttgaaataattcagtaattcttggttaactgttcactccatttattactcagattgttggccacttctttattaaacatttatagctactatttaattcaactcttgctaataaaatagtgtattaaacttacaattagggtttatggggaattgaggcttatcattccatgctccaatgatttttatcagatcgttaaaaagcatctaataagaatgatggaaaaggggcaagaaagcatcaatttttgtgttttttaaaatttaatttaaattttctgtgtgatgtatgacctattcacgtgggtgtgtgctcttgtgctcacagattctcgtgcacttgagtgtgtttgtatatgggttagaggtcaatgtggatatcttcctcaaccattccccaccttattgggggtgggggtgggaatccacctgcctctgcctcccccaaactggcattacagtgtgccccgttctttttagttggctcctggggatctgaacccaagtcctcatgcttgttcggcaggtactttaccacctgagctgtctcccaagctctcaactgtttcatattttttgggccattaagatgactcatctcgtaagccaaaagcctgagattgataccgagattccacagtggaaagaaacaaatgactccctaaagttgtcctctgacccgaactcatgcacacatatcttacataggtacacaaaataataaagaaaataaaaatataattaaaaattaaactttaaaactatatttctggggatatcaacaaaacatggcatatcaagttgcaataaaactggcgggggaggggcaggagatggcactgggattaacatgtgaagcaagtttaggggcaggagatggagctgggattaacatgtgaagcaagcttgactctaatttaaataaaaaaaaaaagacaggaaaaacaaaagttgcactaagactaagacccttcctttgtattaaagctgggcaagacaatccagtatgaggaataggatccgtggtctctcggggtctacagcacatctgtccaggacctcctgcatttcacaatttccattgagaagttgggtgttaattctgacagggttttgatggcatgttacaaaggagtgagtcaatgcagcttagcatgccccaggctgtggaaccagagctcagtgccttacccatcactggactgactgaaagtttccagtccttccaaggacaagttttgtttccagaaaaaaatgccaccacttgcaagacaaccttatttaatttcatgagaagagtcagcttcagacctcacctccagggtccatctgttgatcttcctggatgctatacagtcttctggggatcacagggaggtatctcatggaaatattaccgggaggtggtggtgagggactctttggactgcgctgtaggagtctgtatagattcctcatttaggaagacaaacctatgtgttggatgtatgcttatacttcttgcatgtgtgaaggagggcaaacattgcaatttcctcacatcatggccagttatccatctctgtatagagaagccagtgggccgggttggtgtgctccttgattgtgacatggatgtttaagtttcctggatgttgccaggcgttccctcatatacaagtttccttctggaaccatcaatttccctgtccagcctttcttctgcactgacaagacaatataataagaaggtgtagtgaaacattttagtgtattttaagtatttcctactgtaatgttccatcctttattgctgttaaatattaaaataccattagatgaagagtatgattgacaaaacaaaacaaaataaaaactatatttctgggtggtggtgatacacacctttaattccagctctagggggcagaggcaggcagatctctgagtttgaggccagcctggtctacagagcaagttccaggattgccatggctacacggagaaaccctgtcttgaaaaaacaaaaaaaacaaacaaataataattcactcccagtcttctgggcagggaaatgggtgtttttatttcttccattgagaagaagtccctctgtgtttaacattcctggttttcctattgctctgtgggcacaaggacctttgcgttcccaacagtctcctacatacattttattgtaaatccaatccgactgtgcatttctctaactgcttcattgttttgaatggaagctccacccctatttgctgatttcgtgcccctccttcgctcctcccagctcccaccccaagggctgttttacttgttctctgcatgtgtctgatggatctgatgtattattttaccttgcataatgttttcaaagtttctctttaatgtcacagatactaggatttcatcacttacattttatttacatttttttttgtttgttttttgagacagggtttctctgtgtctttggaagctgtcctggaactagctcttgtagaccaggctggtctcgaacccacagagatctgcctgcctctgcctcccgagtgctgggattaaaggcgtgagccaccactgcctggtaattacatttatttttgtgcgagagactgtatggaggccacagggccaacttgtgtaagtcggttctctttctggtatgtggttctcggtgatggaactaagatggtcagagttggctgcaagcactttgcctgctgagttatcttgccagctcagaatttcgtttcttttaaaggcagagtaatagtcttgcattattatacctaataagtaaaagcaaggactcgccaggcggtggtggggcacgcctttaatcccagcactcgggaggcagaggcaggcggatctctgtgagttcgaggccagcctggtctccagagggagtgccaggataggctccaaagccacacagagaaaccctgtctcgaaaaataaacaaaacaaaacaaaacaaaacaaaaaagcaaggacttagggggcatttttacacagtgctcacagtacaacagcatcattcacagtagcaaaaagtagaaacaaatccaatgtctgtcgagagaagtattgagagagaaaacgtggctcgtgaacacgcaggatgaaatcctaacatgctgacacttctaggcaggccttagcttgcactattgctgggaggttttacacctataaccccggtattcaagaggtggagaataaaggatttctgagttcaagacctgactgcaacatactttcaaagggttcaacaaacattactctgaaaaggtttatctgtaatatgggcacatacatacacatgtggatggcgggatcgaaacagccaagaattgtttatctaggtggtgaaaaggcaggggaggtccccagtcctatcaacttttccctatgcattaaaattagcatagtacgcagggcgaggtggagggtgccttggattccagaactgaggaggctgaggcaggcagatccctgtgagttcgaggttccctggtcaatactgggagttcaggaacagcatatggtacacacattgagactctgtctggtaaaaaaaaaagagagagagaaaagaagagaaatgaaaagaaaagaaaagaaaagaaaagaaaggaagagaaaagaaaggaaaaaagaaatctcccggtataatacggaaggcaccacgccagcccgggttgtagtaggccctcctgcgcatgctcccacgacctgcgcgttggtccccgccccctagagtacgcaagcgcaggacgcaggcgcgcagtcagaaaacacgagactcaagctgagggacgctttgcgggtctgaggtactgaggtacgggtctgtggaaggatggagccgctgaaggtggaaaagttcgcgaccgccgaccgtggaaatgggctgcgtgccgtggtcccgctgcgccctggggagctgctcttccgctgcgatcccttggcgtacactgtgtgcaaggggagtcgcggcgtggtgtgcgatcgctgcctcctggggtacgtacggacccgagcccggggtgactgtggacctctcggggtctgctcgtggggtgcctgcagcaccccaggctgaagcgggatttgggggcgccagtggcgcagatgaaggagaagcgtagggcagtaggtgattttgcggggagcaaaacatccataccttgtgcatcgagcttccccagttgtggaaaccacaagtgtcaggggtgggtgggcgtggggaggagcaggggtgtgcacgtcaggctcagaactgaggccccaccttgcgggaggagggagaagcctgctgtttacggtgcactttgatggtctgggttttgtgtgccttaggcataggacgatgagcgagacatccttaaagagccaatcaaatgagaattacagtgtaacaaaagagcagaatagaggtgcaaacagtacactctcagctgcgtaagtttcggaggcttcacggtgtgcctcgccatgcagtggctgcgcagacagatgcaattcatcacctgcctattggtgcaacagttgacgtgacagtgttttggaagtctggaagcacagtgtcagtgtgaggtgatttactatttatggaattgtataacatacatgtgtattcatagggtttgtattccgtcagcactagccggcccgggtcccatcatgcactggggtaaggactcggatataggtaggttgattttgtatcagtctgtggttggggtgggtagaggtggggacatagtgagggttcatcattccttccacaatctccgtgtagatctggcttgtcctcgaactcacagagatccacctgtctctacctcttctaccttccaaaggcgatggccatcaccgcctggcctccacaatattcttggttagtttatggttgaggactttgttttgcattaatacagataataatcttatttgctattttgtggagtaatgatggcaatcacacacacacacacatacacacacacacacacacacacacacacacacacacacacacacacgatttgttgaggagagagcaacttgaagttcgtgtagttaaagcaattcattcctttcaaaactcaaacgtaacccatctcttcttactaattagagaaagcaagactcttcattctgctacacactttggagtgtattcagagtgtgggtgtacttactgtaccccatagcagagggcttactgcttgagtcttgtaatatcaagtggtaaagacaatgtagcctccttgtagacattgtctgactgctgtggttttcattggggggaacagaacaatttgatcataaacagtgacaaattagtaatggaattattagaaataatcttttaaaaatttctaatggagcctggtggtggctcacacctttaatcccagcactcgggaggcagaggcaggtggatctctgtgacttcgagaccagcctagtctacaagagctagttccaggacaacctccaaagccacagagaaaccctgtctcgacccccccccccaatttttaaaaatgatttatttaattttattttgtgtgcattactgttttgcctgtatgtgtatctgtgtgagggtgtcatgtctcctgaaactggggttacacacagttgtgagctgtcatgcgggtgttatagacagtggatgctgggaattgaaccagggtcctctggaagagcagccagtgctcttagcctctgggatctctccagtccaagagatgttctttaaaaaaatgtaagtttattgttttttttattgtacgaaatattggatttcaatatgacatttttgtacacgcatttcagagctgattttgaatcacaagctacaaggagttctctatttttctggaataaagtgtatgagccttttatgggtagcagtgcctcttgattgatcatactacatcattacttttatcatttttctttggagagccatggagattcaatgacaaaaggaatttcttgaaatgctgtgtgtgtgtgtgtgtgtgtgtggttctcagcattgctttaaggctgtgtgaaacctggacctggggattggcaggaaccaagtcagaactgcacagcagtgattgggctagagtctgggcggtgtttcttctgttgtaccatagtaaatggattgtgcagcacatttcactagcactgtggactaggggccctgttgcttctctttgggaaactaattattgttggagatttgttctctttgttggcttagctgagctcaggtctgttacagaatattgctttaattaggcaagatgtgtttgttacatttgtttatgcttcgtaaagatgtgttgctttgtctgtctaaggcactgattggtctaataaaaagcctaatggcgtgggcggtggtgactcacacctttaatcccagcactcttgaggcagaggcaggtggatctctgtgagttccaggccagcctggtctacagagtgagttccaggacagccagagatgtagagctgttacacagagaaaccctatcttgaaaaaccaaaaaaacccccaaaaaacaaaaaaaacacgtgaatggccgatagctaggtgggactggcaggcagagagaataagaaggagaagagaaaagaggagacaaagagaatgagggaggagagggagatgccccagtcacctgccagccaaccagatacagagtaggacttacagagtgaaagaaaggtaaaaagcctggaggtaaaatgcagatgaagagaaacaggttataaaataagttataagagctagtggaataagcataagataatgctgaacattcataactaataataaatgtccttatcatgatttgggagctggttggtggacccaaagaaagcctactgcctaggccgctgcttgtaccttaactgacagaaaagttgagaaagtattggtcttcttgattcaaagataggaggcagcctatactcagtgttgttaacaaatgctgtgagcccaaacagatgtacccttcttttgttctggttaatagatacctgcttactaattctttatataaaccagtagatttgtgcttactttggtataccgtaattcactggcgttataacaggctcttctaggaacacactcctatctgtggttacctaattgagaatcactgcagcctgaaaatctggttaaggaagtgctggtacattcttaatgaggtttgccatcactgctggatgtcatggctgcaggataggtttctgtgttcctttctttgtaggtgaagtcattatttattcactcattgtcacttgtaaaactcttgagaagaagctgttgcattgctttgtttctgtagccctaatgcagagcacacataaactcttattttgtaacataagtgtctggcagaattattttgcaaaatccttttttttttttttttgtttttgtgtttttgagacggtttctctgtgtagctttggagcctattctggtactggctctgtagaccaggctggtcttgaactcacagtgatccacctgcctctgcctcccaagtgctgggattaaaggtgtactaccatgtctggtaaccctttgtgttttttatttgaattatttcacaattagattgtaaaacatggactttataacatttagggggaggggataaaaatagaaaaaaggaacagatattataattattagtgtccagaaatgattttgaaaaggttctatttgctttcctttgtatttgattagtgctttgattagtacatatttgtgtatttatttgttcatttgtttacttttagacaggatttcttacagttcacaatggcttgctagctacacagctgaggatgaccttggactcctgaccttgtttctgactcccaagtgctgggataatagggtgtgtactagtgtgtcagactttttttgtttttaatcaagaaacttgaatctgcttcctgactttggttgttcttctccttaaggaatggcttctggtttttcttgtagtgagtggaaaagacaagagaagctctgaggtagagtgattgcctagcaactggaaaagaaaagatgaaattgtgagtcattgcaattgtgaattggaatcattcatagtttttctctgctgttgtacacatttttagtttgctgctgatacaaaggactgattgtaaaatgaggtgtgtttactttcagcttgatttggttaaatgcagagtgtgaaatttcactttagggtctggagaactggctcagaggctaagtaatagcacttcctgctcttccagaggaccctggtttgatccccagcatctgtgtcaagcggctcacaaccacttgtaattccagctgcaggggttctgattccctcttctactctctgcaggtatctgttcacacatggcatacatatacatagatacacataaatgaaattttagatataaatctccagatagccacacagtaatcgtcttgtttttctaggtcttcttaccaagacactgcctgaagtctaaacctctctatgctaacacacaaagcacacagaggtggtaattatttatgcagtcaaaggacagtattttgggtttagaaaggaccaagttgccttcagcttccctatcaataccgtctgtggacaaactcttaactgttcctctgtagttaaagagctttgtgcctcccaggagggaagaggatgacttagatgacttagaagtgggaatgtcttccttttctgcttttgtggattgtggagaaaagtgggcagatgtagggtaaacagattctgggaattacacgcttctactgttcttgtctggcccacgttctgtggttatggtgggcgttaaatggactgagggacacgtaatagtacagtagtgggtgctcgtgtctttatttgggaatctcattggttttttttttttttttttgtaatgttggggatggaacctagagctttacacatgccaggcaggtactctaccaccaggccacaccccagccctgttgtttaaaatcatgagaagagttagctacgttgaccatagcacagagtggtagaaggaacctgtggagcaggggattctggaatgctgtgaaatgctgtcttaccacagcacggtagatggggaggagttagtgactgagtgaagagtaggcaccatgacaaagcaccatggacaccagggatgggagcacagtgacatccccaaaggtgagatggctactccttgcagcagagaacgttgaggatacagaaaaataccagtgtctgaggcatttgctacattgcatccagggtgtccctctgggaagcccttggagaaacacctcttcaaagcagctactcagagcagtcctggtaaggagttatgctccaatctgatgctaacgggaacatacagatgttggttgatacatttggaatttccaggctgtttattaggagagatatttaagaaaaaggtgagttatagaacaaagcacatcatattcaggagatagattagggctcttggagaaaacaaggtagccatatttgagttgaaatatatttttaggccatcatggcaacacaggaacaacgtttagtaagatggtgaagtctgtcttggctaaggactgaccttgactgaagacaaggggaaatcgcttcatgctttatgatggagagaggtcttctagaaagcagcaatagtgattgaaaggtaacaggcaaattcaggcgtagtgtcacacgcctttaatcccagtactcgggagacagaagcaggcagatctctgaatctgaggccaacctggtctttgtagcacattccaagatagtcagctgcttagtgacaccctgtttcaaagacaaacaaaaacattgaaacgggcattactttggtgccggagagatggctcagtggttaggagtgctggttattcttccagagaatctaggtttgattcccagcacccacatggtggctcacaactgtgtgtaactcctctcccagggaatctaatacgattttctggcctctgcagacactaggcatgtgcatatatgatgcacagacatacatgcaggcaaaaactcccatacgtataaaagaatacattttaaaaaactaaaaaagaaagtgtgagacagccaagggagtggttgctaagtgactcagacttaggaggtttgaaatagttttctaggagaggagagagaaatgcctgctgaagggtgaacttggtgtccagtgttgcgggaccactaaaaacttgttttcatttgaacacttagtagagcagtgctttttgccctgtctcagtagccagctgcttggctctgagccttgcactgacccagggatgttgggtgagtgtaatggtggaggaggggagcttgggattgtaagtgagggcaggtgtaatggtgggtttcagcctctaaactaggggatggggtcaccagcaaagccatggattgtgaatgtggcagaattacacaattaaaaggtcttatgtcactaagtcacccagagtggcctgaactcactgtagcccaagctggcagtaaacttctggtccttttgcccctgcctcctgagtgctgggatttataggcaagtgcctgactacaggccttttcattttcatttatttctgtgtgtgcatgtttatgggtgtacacgcacatgcgtatgtgtggatgccagaagacagcttctgttgcactgtctcaggcactgtccacgtttacttttttgaaacagggtctcttactgtcctgggactcaccatgtagactaggctccccggccacttctctagttctgagataagaagaatgtgcgccacacttagctcttttaagtaggtcctcagggattggcctctgctccatacctgtatggcaggcagttaaccaactgagctactcagctcagactgtctggactccagatgtatggtacataggctgaccttgacctcatagaagagctggctcagtttccccagtgctgtgattacaggagtaggccataacatcctgctcttctcagtttttcttcttagttactttcctatggctgtgaagagacaccatgaccagggcaactcataaaaggaggcatttaattgggggcttgtatacagtttcagagggttagttcattatggtgtcgagaagcaagcagacaggcatggaactggagcagtagcggagaactttacatcctgatccgcaggcagcaggtaggggaataggaagagagaggtggggggaggaagggagggagggaaggaaggagacagacagatagacagacagacagattgggcctggcatgggcttttgaaacctcaaagcccatccccagcagcacatctcctccacaaggacatacctactccaaaaggccacatgtcccagttctccacaatcaatttatgcaaataaataagcctatggtggggtggatattctcattcaaactaactcctcccctcccagacaagagtttctctttttttttttacagcctggaactatagagccatttcaaaatcaaagcttgggcattcctggtaatggttgatgggtttacccgagggtcagagacctggagtgaaatgagacggagagactgataattaggtgggttggaaaaagacactgtgaccatgacttccagttttctttgtaggtaggagttataattccttttgttttgcttgttgtcttttgcaaggaggtttgggaaagggtcatgtggctgagctctgagcctgaaaacctttggtccatgtgattgccacagcagagaatgctcttaatcgcacaggatgcaaacctttggtccatgtgattgccacagcagaggacaggatgcaaacctttggttcatgtgattgccacagcagaggacaggatgaaaacctttggtccatatgattgccacagtagaggacagnnnnnnnnnnnnnnnnnnnnnnnnnnnnnnnnnnnnnnnnnnnnnnnnnnnnnnnnnnnnnnnnnnnnnnnnnnnnnnnnnnnnnnnnnnnnnnnnnnnnnnnnnnnnnnnnnnnnnnnnnnnnnnnnnnnnnnnnnnnnnnnnnnnnnnnnnnnnnnnnnnnnnnnnnnnnnnnnnnnnnnnnnnnnnnnnnnnnnnnnnnnnnnnnnnnnnnnnnnnnnnnnnnnnnnnnnnnnnnnnnnnnnnnnnnnnnnnnnnnnnnnnnnnnnnnnnnnnnnnnnnnnnnnnnnnnnnnnnnnnnnnnnnnnnnnnnnnnnnnnnnnnnnnnnnnnnnnnnnnnnnnnnnnnnnnnnnnnnnnnnnnnnnnnnnnnnnnnnnnnnnnnnnnnnnnnnnnnnnnnnnnnnnnnnnnnnnnnnnnnnnnnnnnnnnnnnnnnnnnnnnnnnnnnnnnnnnnnnnnnnnnnnnnnnnnnnnnnnnnnnnnnnnnnnnnnnnnnnnnnnnnnnnnnnnnnnnnnnnnnnnnnnnnnnnnnnnnnnnnnnnnnnnnnnnnnnnnnnnnnnnnnnnnnnnnnnnnnnnnnnnnnnnnnnnnnnnnnnnnnnnnnnnnnnnnnnnnnnnnnnnnnnnnnnnnnnnnnnnnnnnnnnnnnnnnnnnnnnnnnttttttttttttttttttttttgtcttgtcatggagactccttcctattggactgctcatttattccttgcatttggatttgctctttgctgcttagactgtcgattctgatgtccagaaatctttatgctgtggaattcttgtttgcctctgaccttcatgggacaggactcagagtagccagctaatgcctgggatcatgactgcacttcatgtatgctgccttttgaggcagccccttcacatgcctaaaaattattaaaatagattcagtaggaagtttagaaagaaaaaatgctgctgaggataatgtcaagtttgttttgagacaaggcctatggcccaagctccatggaactcaccatggagccaagggtgactttgagctattggtcctcttgcctccccctcacaagtgttggtgacacaggcatagaccaccatgcttgtcataaaaggttttgtttatgtgtatcttatctattgatatttacagcatagactaattaaaactgggatgattagggctacaaagagaaaccctgtctcgaaaacaaacaaaaaaattaaaactgaaatattgcagaataattattgaagggtactaattaattaattaatttttcactatggaatcagatgcactactatgtaacaaggttctctggtgtttactgtgtagtctaggctggccttgaacttgaaacaagcctccttgcctgcagcctcttgaattctgggattattataggtatgagtcccaggattataggtgagtccccacccacccactccagctcagctcaccccaggctagcagttgtgttttagaatacacacacacacacacacacacacacacacacacacacacacacaccacacataaagacacatacacagacacacatacacacacacatacacacacacagacacacacacatcacacacacacagacacgtacacacacacacacacacacagacacacacacacacatataccaatgcccttgacgtcaccctcctccttctgactatccttattccagggctggactcaaagacttgtgccatcataggcttggggcaagcagtctttaaagagggagggaactttgtgatcaagtcagatttctcaataggtgccaatcaatgacatacacttacggaacgaaacggctgccacttcggatccagctgacaacaccttcaccgtttccgctgcgggtcgttacaaaaggggatcagaaccaagccgccagccaagagtgtttccgtggctcactgccagctctcctacactctagagagcattttctgctctgcccttgtcatttatttgtgtattcggatcatgtacccccagggaagaccacgcccattgggccaagctgccccaatacaattggctgtcagatggaattcccacaacagtcgttcctgcttcaacctttggagtcccaggtttataggtattatgctggcctcgcaggtggatctctgatgtttgagatctcccacggtctacaaactaagttccaggatctctaggacatctccatggatgaatcttcaaagctgtctatggggataagagcaggggatgcagctgtgtctccctgacaatcaagagaccacaattcaatttgcaggaattcttgatagttatggaaggaattttcaggatgaatcagtatgaagaaaagttggagtttaccatgtgccgtggtggtcaaaggacgattttcgggagtcagtggagatcaaattcagattactagcttgatggcaaatgcctttatttgcttattatcttttcactgacttaagaagcagcctgaatatagatgtgtaagcatgggcattcattcaaggagacaggcacttaggaacatgaaagtatactcccaagtacggctttgggctttccaagagtctgagttgcctgtttcccttagtttttactgtctgaataattgtcaagccttgaaacttttgccaatctggtgggttagaagtgcattaaatatggttttaatttgtaaaagcatgtgagtatgttgtcatgtgtgtgtacataggccataaggcagtcttgggtgttgtcatcagtaatgctgctcgcttcctttgagatagggtctctgttgaccaactaggctgtactgctggccagctagccctaggcatcctcttcagtctttgccttcccagtactgggatttcaagtatgttttctgggtcctgctgctcaaaccagcctattagtatacccagctcaaggaatgcaacttctaaagaacttccttcctcttaccctcatccgacacgcttggggtcatttccataagggtcacccaaggttttgttgcaaccccacccacccccttctttttgtgtgtgctgggagtggaatcagaccttgtgcatgaggagagttctctaccacggagctgctcctagagtgtgtcaagcactagctcatgattcacacttttttctctggtgccttctgaggagcatgggcgcagatgtagaggcactggcgggtgggacaggcaatgtctgaggaggactgcggagcacttgtccaggggacgctcttagaggtttaacaggcaaaggaagatcaaagatcaacctcttcagagagcccacactgaggagtaagggttgtgtggacatttccccaaatgtttgcacccccaatttagttaattcagttcttgattctccagctgatggtctgtgggtcagcaacagcagcatcagggagctcatcagtaatgtgccactttaggctctaacatacactgaatcagaacatacattttctgtatgtgatttcaagatggctctgtaacttgtttgcacattcgactaaggcaagctgatttctgtacttttaaaattcttagcaacctgattatttgaaagctacttactctgagaatatttgaaagctctatgatttgatttttacacataacctacatatcccatatctaaagattgtatacatcaaattttagacctcctgttgccatcttaattatagtagaggcagagctccctctggtggacaatgggaagaaaatcacacaaatactttgcaggaaagcaatttaagttttcggatatttaaagtgcatttgtgatactgaggcagaaagatccatgcaagtatgtgagcagtctgcaccccacctcccaaaaaaacccaggcaaacaaaaggaaaacaatagtggccttcccaacttgttgattgggtttgactttggtagaatagttggtgaatgtgcagaatccctggattcaatccacagcatcatgaacactcaagaaaattccctaattaaaaaacaacaaaagaatcccacacaacaaaaaacaaaacacccgaacatccctcaccatgaagaaattccgttgtagctttccgttgtaaaggtggattattaacagtggccatgttttcaggattaaattcacaacaaatatttgatagtcctatttgaacttgatgtacttgatgtgatcttggggaaatcaggtttttttttttttacaagacaatcctttattgttactattttgaacacgtggccctgcctctgctcttcctagtcagaacacttaattttaaagtcagatatgaggttaccttggaatatagggccctaactctagcccatatcctgggttctctctcaatgtccagcaaattcagggctctgaaagttgagctgtgaatatttgcataaaacctgctacatcctccttatgaggcttcggtgggacagaaagggagagagtagcaagctgaagaaagccataggcaaagtccaactactggactttaagtccaataaggtccaggttgatagtcgaaggtgatgggagaagctgagaacaaaactgaggcctgagtggctagagaggcctggtgtaaaaggtttatttcccccctttctctcctccttttactatgtgtgttctggggattgaacttaggctgtcaggccggcagcaagtgcctttctgtactcactgaacattcctgctgttccctggttttgggtttttttgcagtagggtctcactgcataggcattttatttatttcactgatttattttttttcttatttaaaaaaaaattatatttatcacttacctgtgtgaaatttagttttctcttgccatgacaaagcaccgtgaccaaggcaacttagaaacggaagggtttatttgatgatcgtggttccagagggatagagtccatgacattgtgacagggagcatgacagtaggtcgacatagtgctgtttgtccccagtgatgcacatcctcccacgaggccacatgtcttaatccttcctaaacagtttcatcaactgggaacagcagacaggacaggtgttgagaatccatctccagaaactggctgcacagcaacccccctttggacagccttgttatgctcgaatcctccaggaccatagatcaaaagtcttctgcgtggggattttgctaatgcagaatagcttttaccacttgcttgtgtttcctgtttatagaaaccaattgaaaatccctgccgggcgttggtggcgcacgcctttaatcccagcactcgggaggcagaggcaggcggatctctgtaagttctagtgccaggacagcctccaaagccacagagaaaccctgtcttgaaaaaccaaaaaaaaaaaaaaaaaaaaaagaaaattcctgtgacaggtgtagggacacctgtaatcccagcatttgggaggcagaggcagcaccaccagttcaagaccaatttaggctacatagtgagataagatcatgtctcaaaagagttctggtttctgtcacttgttaaatatggtgacaattttgtcctaaatgttttattttaaaaattatgtgtatgtgtgtgtgtgcacccgtgcaggtacccttgtaggtcagaggagggcattgcataccctggaaccggagtcataggtggttgtgagcctcctgaaatgggtgtagggaactgaactcgggtcatctataagcagtgttcttcgctgatgaaccatttggtcacttctgtaactgtcgatgtatctggggatcacttgctttgaaaacaaccctctcccccctgtttgcctttctcccccatgcctcctactgtccccactttcctttgttttcccaggctccagccatggatgctgtctgtggtctaaggcagtggttctcagtattgctgtggactgcagccaccaggaaatgcttaagcaccttgatgctgggttacttattaaatcaaaaccttaaggtggtacctagacattgtaattttccattctctaattgcctagtagatatttttatctcttattcagtctataaataaaataatgaatttaattagatagattctgagttcatagcatttcacttagatgctgtccactctcccaagcagtgtctaagtcccttctctctctgtctctctgcttcctccctctccctctgggcacacatgtgatacagaaggacgactttagggagtccatcttctcctttcactgatctagagctcaaactcaggatgtcagcattatgctacaagctcttttaagccatgtcattgactgtctctaccttatttactgatgttggaaattgttttacttgttttattcatttatttacttgtgcacgtgtacacactacaacatacatgtgaaggtctgagaaaaatttgtggagctgttctttccttgagccatgtgtgttctggggctcaagcattaaaaggttctagatcagcgctgccgaccaaggaccaaggaagtgtgcaagcacatgagactggagagcatccccatccaagccctaacagtaaccacaggagggcctgccttatgtcttattccctgaaatgccacatacagttgaaggaaatcagtaaggcccaagtcaagcaaggagagctgtttatgaagtctgaatgtagaccaaacatttccagggctaactcataatcctcagagtaaccattaagggccagggttaattatgaggagctgaagcctacgttgtgtatctagttgagaagatttaacctcatttcattcctctgggcaaaatgataaactgtaccaaaatatcaggtcatagaatcactgtcattttttgaccacacccattccaaggcaataccctctcctatcccgtgtacgattatcttccccttacatgcagctgtgctgctggtcttggcttttacatgggtgctgggaattgaactcagatcctcatgcttgcacagcaggcactttactaaccaagccatcttctcaggcaaccccccacccccatgtctctctctctcttaaattaaccattacccagtcctttccattctcacttgggaatgtcacacattccacctctccctttccattgccactgccctcaaagagaaagggtattgccttgggatgggcactattaggaggttttgttgggggaagtgtgtcattgtgggggcaggctttcaggtctcatatgcacaaactatgcccagtgtgggacacacagctcacttcctgttgcctgtggatgaagatgtagaagtctcagatccttctccagcaccacatctgcctgaatgttgccatgaagacaacaatagactaaacctctgaaactgtaagccagctcaaatgaaatgttttcctttataagagttgccatggtcacagtgtctcttcatagcttcagaaaccttaactaaggcgatggtggccacacctttaatcccatcactaaaagacgagtggatctctgtgagtttgaggccagcctggtctacagagctagttccaggacagccagagccacacaaagaaacaccgtcttgaaaaacaaacaacaaaacaacaaaaaagaaaccctaattaaggctagcactgaaataaatgtgaaaaatgacagtgatagcctattcaaagtctctgctgtttttcttagcttatcttggagttcttcagcaagtctcatttcttctgtctcagctttgcttttcagctgaagtccttcttttcttttctttatttattttgtttttttcgagacaaggtttctctatattgctttggaggttgtcctggaacttgctctgtagaccagactggccttgaactcacagagatccacctgcctctgcttcccaagtgctgggattaaaggcatgcgccaccaatgtatagtgttctgcctgcatgtgcttttgcaggccggaagaaggcaccagatctcattatagatgactgtgagccaccatgtagttgctgggaattgaactcaggacctctagaaaagcagccagtgctcttaacctctgagccatctttccagcttcctcagctgaagttcttggactttatatcacactggtcaatggtaaagtctcttttgtttcagtcaggatattcaggtcgtgccaacagctaatttgatgagtctgtttttaaaactcccagacttacattgcgtgatactatccatgtagtactatcttcaatggttacttctacagtcacaaatctaataaatgggtttgattgtaatttgtagttcaacttgtaatgagcaggctttaatgagccaatacttgtgggagatagatttattgagaggccagtgaatcacttggctgctgtgtctaggaaatgttaaatggcagctgagtggggccagcactgtttttatttcccagtggggtcatgcttcccagaagtagtccttgtaggtaggggcatttcctgttcttttccttcttctttgggttgatgaacaatttctttgcgtgtcccctatttgttgagaactgtccttcctttctcctttactcccacagcactacagagtttgtctcgcttttttttgcacactgtatatttacttatagaaaggttttacttttaaagattgacttatttttattttatgtgtacgaatgctttgcctgcatgtgtgtacatgcttggtgcctgtggaagccagaagagggcctcagatcacctggaaacagagttacagagtgttgtgagcctctgcatgggtgctgggaactgaccccaggtcctaatgctgaggattccagtgaaccctactgtacctagctccgtgttctgttttaattgactatttgaaaagtgaagttattaaattatattctgtcttctggaagctctggagacagggactatggatcgtgctactaataatatttatccaacatttatctattctctttgtatttaaaattgaaataagtacataatttcccctacaagcccgccatgtccctctccgtgctctctctcaaattcatgacttatttttctttgttactgttacacaaataaacatatacatatgcatacatattatatatgcatacgcatataaatagattttggtcagtctgtttagcgatacttgaatgtgtatgatttcagctgactagttggtgttgggtaaccaattagggtactcatccctagagaatactgtttcttttattcacagtagtccttatagctcttgtccaaaggtgggaccgtgtgacagttcccgttccatgatagcattcctgttggtggtgcttttgttcaggtcttgttttggcagccatattgctgaggtttcctgggtacagtttccctgtcatttccgtatctgttatttctcatataaactagatctttggtgtcattctaggctctaaatagtgcatataagtactttatttttggcatatacttccttgtaatttttttgagacagagtttctctatgtagttctggctgatcttgaactcacaaagatctacctgcctctgcctcctgagtgttgggtttaaaggtgtgcgccacaactgcctggctttttttttttttaaaagaagttgtgtactattctacatttctttcattttttttaaaagatttatttatttatgtatacaacattctgtctccatgtatgtctgcaggccagaagagggcaccagatctcattatggatagttgtgagccaccatgtggttgctgggaattgaactcaggacctctggaagagcagcctgtgctcttaacctctgagccatctctccagcccaactgcctggcttttatatatgcttttttatatactgcctgggtctctgtctgtctgtctgtctgtctgtctgtctgtctgtctgtctgtctctctctctctgtgtgtgtataatcttggagattctctgttgtttatgtcaaggggctagtgttgtgttttgttacattcatttttccccatccttctctctctctgtgtctcattgtttatttcagtggttttcaaccttcctaatgctgtgaccctctcatatagttcttcatgttgtagtgaaccggaccataaaattattttcattgctacttcttaactgtaattttgctacttttgtgaattgtcatgtaaatatccgatactcaggatggtcttagacgactcctgtgaaagggccatttgatccccatccaggagttgtgactcatggcttgagaaccactggtttatctggtgctggtgacacccaggtccttatgcatgctagctaagcgctctgccacagagtttcctcctgccctcattctttcttcaattgttgtagctccaggactgcatcatttattttctccaaggtttggactattgatgagcccatgctgtggggattaatattttgtaggggcatgttactatgttttgtttgtttgagacaggatcttgctgtgtaggtagactaagatggcctagaactatatagtttcagccagctttggttttatggtcatcccgttgcctcagccttgtcagtgctgagatttcaggtggagtccactttttctagaggtaatgtaactgttttggggtgtggtgcttggagatggatgcctgctgagcatatgatcggccagccacggagctacattccaatcgagaggccacttctcaattcgtgtgactacatggcagtgacggataacatggtatttggaacaagacaacttagatttgagtacttctgcttgccagatgtatgaccttgggcagttcagtgttcatctttctcatttacaaaatgagacaatttctacctcttcgataggattctagtgggactcaaagtacatggaatgccaaattgttatatacaagcaacatgcccaccccagacaggttttagagataaagatcaattagctcaagaattagagttaagtgctttcggttcacttttattttacaagttctgaagttaccatagttacttacagatcagatcacttgtagtgtgttgggtcatgaatctgctatctcctgttcttctgagacagttttgccaggtagcccaggttgacctgaactcatgattcccctgccttagccgtccaccatcatattcatcatattcagctataatgtctattagctttgaaaaaaatttttccttttggtttttctaaaaaaggtttctctgtggctttggaggctgtcctggaactagctcttgtagaccgggctggtctcaaactcacagagatccatctgcctctgctttccaagtgctgggattaaaggcgtgcgccaccactgcccagcttcattgaaaatttttaaaagatcatttctgataattccattattaatttgtcactgtttatgatcaaattgttctgttccccccactgaaaaccacagcagtcagacaatgtctacaaggaggctacgtaagccctctgctatagggtgcagtacacccacactctgaatacactccaaagtgtgtagcagaatgaagagtcctttctctaattagtcagtgagaagagatgggtgaggtttgaggccaagttttgaaaggaatgaattgctttaactacacgaacttcaagctgcctgtttctgatggaatctgatgccctcttctggtatggaattatacatgcagctacagtactcacataaaataaatacataaatctttttttttttttgatgaaaaggatgtgcatcatttgtagctcagaaaattacttgagatgtgttgatattactctcctcttcattaaaatgccttcaaacagtgaggggacctggactagagccgaagggaaaaaagacagatactaattaccatgttaccatgaattgttatttcagctgttttttttttttttcctgttttgtgtcatcttaattgtgttatggtctgaaagaaagcttcaagagaccattgtatcagagaatataagtatgcaaacacatatctctagagtgccaggggagtgttttgtgtgtgtgtgtgtgtgtgtgtgtgtgtgtgtacacaccaatgggtgtgcttaagtatgtgtctgtgctttctaagtgggtgctgaggctctaaactcaggggttcaggcttgtccagcaagtactttaccccgaaatctccctaattaaggggttaattgccaacttatttaatatctttatttacttagtgagacaagatctcaggttgaccttgatttggctacatagccacagcttgccttaaagtccttgtgagagctgggattataggcatgagccaccacacctggcttccttgccacttcactgtgacttactgcgtaatgttctttaatgttttgcttgaatgactggatgattcatgagctgaccaggttctaagcagttaccgccagctcagtgtggagcttagtgttcgagtacatcagtagggatgtacaccacagcagaggaagattctcctttgatctcacattaaccccagtatcttaagaaatatttgaaaacagactcacctgggcacgatagaaaatttgttctgttattaggaagagtaaactttcccaagtccacattaatctgtggtatgggtcatagcagtgtaaatgagaagaaagccatgcggctctctagttttattaacacttggaaaagctgctcatggttggaaacccttctgtttctgtggtcccgtgttttcccctctgtccctgactggtgatttccaaatctagtttgggagaagtttgtggctttcattcctcagtgctctaagtgggctgattccagacctgagctgtagagaaggcggtgtgctgaaaagcatggagggagacagagccagcaagtcaaaactgaaactcccgggagatgttacagatcccacattcagggttccaaggaagactggctcacagagtttgtattctgtgaaatgatgtagcctcagataaacaaggggactgttggacatttggaaatccagaagttataatgactcgaaggcccataacttcttagggggagagagtgggtggaggagtgggcagaagaggcccggtgggtggagatgcagatcatatcctgaggagccggaggtgaggggctgtgctagctggcatttctttcttgggatcataccaggatgcatgtagctagggttagccccgggcacttgaaggaaatggaaaagtttacaaaccaaaatggaagtccatggaagtcatcctggaccttctagaatgaaaaataatccatttgtattcatctgttttctgatgctaaatatatcagacctcaaagcaggtaagcgctggaagaatttgtttttggctcatggctttgaagatgcaaagtctaggggctgcctctagtgatgccctagctgcagaggcatttcagggcacactgtgacaagagacagagtgcttgtgtgtctgcctctgctcgtcttagaaactcagcaagattcagtcactggggactccaatgaccatgtacttctgcacattctaatgacctcacctctaaacatcatggctggattaagtttccaccctctcaatacctcagttggagattatggttcagtatgtgaaccctggatatgtgcctaaactaaaccctagcagtaccatgtgctcattgttagctttgctgtgtggttaggtggtcttcttcccacctccattcacaagccatccaaggcattagtcatttcctttgtccaaaaaaaaaaaaaaaaagtgtatttgctatatgtgtcggtgaccatctgtattagccccacattgtggggccatatgtcgccacctggtgtctgtggggctacagaaccagtggaacagccccagatctgttcctgagtgggggagtgtggatgaggaaggctagctatcggcgttaaaggaaagatggagacataagataatatcatgagggcagtctcagttaatactgaatgcgcccagtttattcatgcatcatcttaagtaaccatccaaaggtaggacaatgactaaagatttctattatcatgtataaagggcagatagctattacttcccttaatcctaaagacacttgcagccgcacgtcctcagccatcaggcactcactatcacctagccttcaggatgagtgtaaacttgcctgggcctgggtctatatttagataggagccactcaccaccgaggtcaggacatcctgcagtcattagctgatatcttaaagacaataggacttgaggctctctgaactcaggatggcaggatggaatagatttccaatatacaggccccagtttatatggacttaaaaaaaaaaaaaaccaaaatcttgtaattaaggtaattaacaatagctttatttattagtttttgagatacaatctcatgtagcccaggctggcctcaaactcagagatctgcttacctctgcttttcaagtgctgggatcaaaggcgttcatcaccgtgccctgctttagatagaatctttttataggcccatctgttcttcctttcaatagctgggatcataggtatgtatcacagtgctcaggtacagcaattccgtagtattgggaaatgtccattcaatatttaaagttctcctattgtcttctttttgtttgttcacatctggtgagtccaattaagggatcgtacattacagttgattaagtcattaaaacctctttctttctttcttcctctctttcttccttccttccttccttccttccttcctttttttttttttttttgatgcagggtttctttgtggctttggagggtgtcctggaactagctcttgtagaccaggctggtttcaaactcacagagatccgcctgcctctgcctccctagtgctgggattaaaggcgtgcgccaccaccgccaggcttaaaaactttttcattaaggagaaatttatataacaaaagtaaccatgtgtaaatgaagagtctactgggatttagtacagttacagtgaggtgtaacgggacctagtatagttgcagtgaggtataacggatttgtacagttgcagtgagatataacgggatctagtacagttgcagtgaggtgtaagtgggatctagtacagttgcagtagagtgtaatgggatctagtacagttacagtagagtgtaacgggatctagtacagttacagtgaggtgtaacgggatctagtacagttgcagtgaggtgtaacaggatctagtacagttgcagtgaggtgtaacaggatctagtacagttacagtggagtgtaacgggatctagtacagttgcagtgaggtgtagtgggatctagtacagttgcagtgaggtgtagtgggatctagtacagttgcagtgaggtgtaacgggatctagtacagttgcagtgaggtgtaacgggatctagtacagttgcagtgaggtgtagtgggatctagtacagttgcagtgaggtgtaacaggatctagtacagttgcagtgaggtgtaacgggatctagtacagttgcagtgaggtgtagtgggatctaatacagttacagtgaggtgtgacgggatctagtacagttgcagtggagtgtagtgggatctagtacagttacagtgaggtgtaacaggatctagtacggttgcagtgaggtgtagtggggtctaatacagttacagtgaggtgtaacgggatctagtacagttgcagtgaggtgtagtgggatctagtacagttgcagtgaggtgtagtgggatctaatacagttacagtgagctgtaatgggatctagtacagttgcagtgaggtgtagtgggatctagtacagttgcagtgaggtgtagtgggatctagtacagttgcagtggagtgtagtgggatctagtacagttgcagtgaggtgtaatgggatctagtacagttgcagtgaggtgtagtgggatctagtacagttgcagtgaggtgtaacaggatctagtacagttgcagtgaggtgtaatgggatctagtacagttgcagtgaggtgtaacaggatctagtacagttgcagtgtagtgtaacgggatctagtatagttacagtggagtgtaacgggatctagtatagttacagtggagtgtaacgggatctagtacagttgcagtggagtgtaatgggatctagtatagttacagtggagtgtaacgggatctagtatagttgcagtgatgtgtaatgggatctagtacagttgcagtggagtgtaatgggatctagtatagttgcagtggagtgtaacaggatctagtacagttgcagtggggtgtattgggatctagtacagttgcagtggagtgtaacgggatctagtacagttgcagtggagtgtaatgggatctagtacagttgcagtggagtgtaacgggatctagtacagttgcagtgaggtgtaatgggatctagtatagttacagtggagtgtaacgggatctagtatagttacagtggagtgtaacgggatctagtacagttgcagtggagtgtaacgggatctagtacagttgcagtggagtgtaacgggatctagtacagttgcagtgaggtgtaacgggacagtgaagtgtgaacaggatcccgcacagttacaggaggtgtaatgagatccaggggttacagtgaggtgcagttgccactgcttggtgttacttttctactctgaggattccctctgtgtcttgttgactgaatttcccttttctcccttgggtttcccaggcctgcttgtcctagattccgtctccacaccattgtttagtgtgcacctttctcctttaagtcttgaattactggggatatctaggtgccatcaatctggggcttagacttacatgagaacatttctttggaggttttgtgtttcgttaggtggcatataatgcttgtgttttaggaaaactccatggatagtcttctatgtatactttacagatggctttgtttgctgtcttcattatagtgcaaacatgtggttgtcttgatgtcaccttgctggggagccatccttttggggaggatggtgccactgtcttgcatttctgattgcagctacacccactgccaccttgggggagctttaggactgtgcctgtgagtcccctacacatgcagtcgttccctgtagggggggacagtgtaagccacgcctgctagaagctggctacaggtgtgcctgaccacacctgtcagggcgtggtcaaagtaaggtctggttgactcctgatagggttttaaggggcaacaaagcacatgggagcccttctctctggccttgctgcccctggcatgctctggctggtgtctggctggtgtttatctgaataaagatatcttaaccttacggactacagatcttctcgtattacttccctatctttctctcagtccttttggtatgatcgcttggatctactcaaactcactgactcagaacccttgtttccacctttcctgctcacctatttccaatcacagtagtcgttaccttggtaacagcaaataactccctactcttgaagtatatcctccattttcttaggtttcctcatattagcttattgctctttaaatattttttttgtactgaaatagcacaaagtttgccattttactcattttaagtatgcaactcagtgacattaattgcattcagtgttgtaaagccttcctcactctattttcgaaactattcatcacctcaaacaaaagaatctttttttgactaaaaaattattattatttttgctgaagatttgtaaaatatatcctgatttaaaactgatagacagtagcccctcctcccctctcccagcccctggtagcttctagtctgctttcctctctgtgaatttgtttttttcaactattttatgcatgaggaattagacatttgttcttctgtgtctagcttattttatgtatcatgatgtgtggcttttgtggataatattattgctctgaaatttacatataatctgtgttgtggacattgctttgattatttcccatgagtgcatctaggactgagatattgtggtcataggcatcccttgttcactcctttgcggtaatgtcacactcatttccacagtggctttgccactcttttggttgtagctgtcctactgggatagcagcctgttttctgtggctttggtttccgtggtcctcatggtcgatgcctccctattcttgaactgcctgcttctcctgtgcacaatactacactttctcggtctcctccaactcccggtctatttctcttttactggctgcacctctcctacctgcctgctgagtatggatggagtgcagccttgggttttcttgtttcttctgagcttttaggtgcaccttaaatacaaggtcccactggtgccttatgcttaagtaactgtgtagcagagtgagtcattctgggacctctgttttccttgctttttcagggttacataatgatactgcccacattataatctgtggctctaaaattgagcaatttgcttataaactgtcctgtatgttggtttgagctggggataagtgtgtacatggcagaggctgagtggagatggatgtttttggcacatctggtgacagagatttgggacttattatttttaaacctataaagttctctgaaggagaaggcttgcagattcaaaatacctttatttagataaataccagccaagcacaagccagagcgtgcccagaggcagcaaggcagggaagccagagagaagggctccccacgtgtctgcagccccttaagaacctaacactcatcctgaccaccgattgaccacgccctgacaggtgttgtcaagcacacctgtagctagcccttagggagcgtggttaccgtgtctccctaccgttctcactgtatagaaagctgtttcccatctgacaaaatgagttactgtttggatcttaaatatcacccagggccagtgtgttagagatttggtcaccaggatggttgtcctgggagatggtggaacctccagaagttaggtattagtggggaggtcattgaagatgagtcccaaagggactgtgaggctcacaaggttaagtagtttgttctgccatcccctcctgccgtgatacgatagtgtgttagcaggctcatgtgaaccggagtggattcaggactggaacccccacagctttgagctaaaatagcccctttctctttgtaattttggggagtattttgttatagtactgtgaaaccaactaatacaaaggaccgatgacttacaagttgcttcctacccttccaagtgtaaatgttgaagaaagtgcagtgtgttcatccgtggattctttttcacaagctcaggagcctctgatttttgtgactgcatagggtgagcggtacaggtgctgggtgcgtgggtttgtaggaagtagagtgtgtatgtgtgttttcaaatgacaatgtgtgtgtgtgtgtgtgttctgagactttttgtgacttgtggtgcagtactgaacaattgacttttggtttatattcagctctctctcacacacacacacacacaaaattatgaagatcatgggaatcactggtgagccagggtttcttttttggccgaatacttagatattctacaaatcatcacagtaccatggcatcgcatgttttcagggtgtgtgtcctaagattgggtcagatgtcctccacttcctgtagctgacttgtgcttccggataattagcttttatagtctagcagccaaatttgatacttctgcagctcttagtctagttgacttgaggaacacgcctcctgcatatttatagaacttctttggtttgtctctaacagtctatttatagataagagatagagtgttttaatcttacccaggggatccctgatgagcccagggtgaaaccaaagcagaacaataaactgcatctgtgtataattggtgtgctctagtaagctgtaatctactcataaaatatttatctgtgctttatgtcacgttaatttttagatcttttcattggaaagtatatttcaatagtttgctaattatagttgaaattaaacattgtaaatgcattctcttttgtaagtatgttttataattggttaatctttttttttttttaaagaagttttattttgggataatctcaaaactacaggaaagttgaaaatacagagaagtttcctgtgcccttcagaatcagaatttagcaaaagttagcatttcccacctgagctgaattgctgtttacacacacacacacacacacacacacacacacacacacacacacttacttcttgagtcattttaaagttaggccacttatgtaataatcctttacttaatagttcagtgtatgttttttccttcctctctgtccccttcctttcctttctttcccctttcccatcctttctgttgttttgaatcagaatcttatattgaacaggtaggccttgaacttccaatgtaggtgaggctggccttgaactcctgttcctgtctctaccccctaagtactggaattacaggcttgagcaacagtgctcaatactccttctctgtctttcggtctttccttgtgggtataatgtgatctctctctctctctctctctctctctctctctctctctctctctctctctctctgtgtgttcgctcacttgagcgtacagatctacatactcacatatctacacacacaaatgtgttctgaggccagaggtgaaacatgggtgttttcccttggtcactttctacaagtgaatggcacccacacttgtgggttttggtgctccaactcagtacctcttcaagagtggtaagaactcctaaccactgggccacctctccagccccttagttctaatagggttttccaaagtctttagatttctgtgtgtaaattcactttatctgaagacatccttttctccttcctgatcctggaggagccacttctggttccttcccccttggctgcagcaccttgttgcctgtgagtttgcagcctacacagtctccttgtgtggtaagggttctttttagttttgtgaaggtttttctcaatgttattgaatgctttctgtgtgtcttgagatggtcaaaatatttcaggtttttttttttttgtccttcattctattgatgtgagcattgtgtttattaatttacatgtggtgaagcatttgcatttctaggataaatactgtaatatgatcatgtgtgattttcttttttctttttttggaatggcttggaacttaacagtgtagaccagactggctttgaacttgcagtgactgtcttgcctctgcctcctaagtgggactgcaggagtgcaacagcgtatttggtctttgaagatcatgcacaattcttgtggtgtactgttgggtttgttggtattttatagaggacatttcacatctgttgttgtgacaaatatgggcctagttttcttctaactttcccagttttggtctcggggcagtgctggctttgcaaaatgattttggggtttttatcttctcagttttttggaaagaactggtgttggttcctttttgacagactggtagcatttgcagtgaagccatcgtctcttgtacttgcttttgtgagggaccctttctcagtcttggtactcattattggcctgtgcaggttttctgtattttcatgggttaatttttgttcaaaagtttaagcttatagtctagatttccccacatattgactcatctttgtttataatagccctttggtatttctgtggtatcagcctggctcctcccagggatgtcagtgggtaggctgggttatgaggattctgtggaccacactgctcatagtctggtactttccagggcagttgctggctactacctgggtcagcaggaaagctggaaacacttcctggagtcctctgcaagccaagctaatcagagggggcttcccagttgcatcaggacaccagagccctttgggtgtagtcagggttccatggttggtttctgggtttaggcttgcaggcccaggtttaccaagtagccttatgagtcctctcttccccggatagcatggcgacacccttctttactacatttcccagaatcctccttctcccctagtcccgcctatcttgcttccctattggccagcagtgctttatttatcaaccaataagacaaacatatacacagaaggacctcccccatcagtcttttgttgtacctctggttagccgttttgtggcagtcacttctgtcctgagtttttacagtggattacagattcttttttggagtgggtgtggggttgggggtagtgctaggtattgaactcagggtctcatgcaggctaggcagctgctctgccactgagccacaccccctatcccttattgtagactttaacatgtctgcattttgtgacattctccattgtcttagggtttctgttacataatcatagcatgtcttgtaaacaaaacatttaattggggtggctcacttacagttcagaggttcagtccattatcatcatggcagggaaaatggtggcgtacagatagccctggtctggagtaatagctgaagtcctacatcttgcaggcaacaggaagttgactgagacattggtcagtatcctgagcataggaaacctcaaagcctgcccccacagtgacgcacttccttcagcaacaccatacccacttcaacaatgccacatatcccaatagttccctggtcttatgagatagattatgggggccaattacatttaaactgccgtacccattaacagttttttcctatccaatgcctggaagagtatttactcagatgacttattaagagtatcataatgtctattatcatgtagagactgacagcattgcagttacagagtaaatgtctgagttaactttctttgagaaatgaaatcagattcttagctcctgacacttgggaaagataagatgaatttagagcttgccatgtgttctggaattcttcagaacctttgctgttcatatgttacctttgacagtttggaacatggatgccttctccctcatgcttgcagtttcttccgatatgtccaggactccaggtcatcatggcatttagctgatagcctgataatggctggagtttagcctggttagtattcactaggcatggtagaaacaatttgtacttagtaattaggagtttacagtaattgtgacatgctggtttgaagtttctttgtactgttgaaggcaaataggaagggatttgcttagctaattaaaactatatatgagaagggaggtttaatcccagtaaccattttcaaacacttgtaaaatcagcacaaactagggatatgccaattaaaatttttttaattaattaaagcactaatggagtctctgaggcattctttcttggcatttgttgaagttactaggaaatagaacctaaagatatttttcaaattactttcaaacatataaatgtaaattatgtgtctatctatctatctatctatctatatgtaaagtatatatatgttaattactatccagtataatcataagtaattgaaacaaaagttatagagaaaaacaatcttgcttgtgatacaggagtcaaataagataatttgtattttttatattttaaatatttaaagaggtatttcttgagacctactaagctggttttacaacttgatcagtttgaaaaaaatactatacttggtgataacctttaacccacattagttgattaattttcttgctgtttgtgtgtatgcatacacttgtcataatacatgctgtgtgtgtatgtatgcatatgtcataatacatctatgtggagatcagaggacagcttctgtgagttagttctctcctcctgtggtgcggattcctgggattgaactttggttgtgtcttagttagggtttcctattgtttccaattgttatgattgttatgaaacaccgtgacaaaaaacaactgagggacacagggtttatttcagttacttgccccatcacagtccagcatgaagggtgggaagtcatggcggggactgaggcagagactgcttaccagcttgctcctcatggcttgctcagcttttgttcttttaccacccgggattacccactcaggggtgacaccaacccctgtgggatgggcccacatcaattattaatcaagaaaatgcaccaatctgatggaggcattttcaaatctccctcatcagattggtgcattttctcagttgaggttcccttttccaaaatgactctagcctgtgtcaaattgacattaagaatcgacaatgcaggctagcaagcacggcagcaagtgcctgtattgttagtcatctcactggcctgtggataatctcgagtagttgtttcattttgctaggtgtcttctgagtgcttctttatccaaaccagaaaagtgagtactagagtagaaaatatggttcccatctttgggaaatacagaccgagagaagggacaaatccatgcatgcttttaactggcataattcaagtttagacaaagcactgtagggttcttcatgtcagtgtgtgtcatatagtaggagggcatgcaagacaacttttgggaagtcaaggtttctctgtgtaacagccctggctgtcctggaactctctctagagactggactgacattgaactcacagatagctgcctgcttctgcctccagagtgctggacttaaaggagtgtgctactactgcctggcttgttcccaagattttactacaaaatctctctctgtctctctgtctctctgtctctctctgtctctctgtctctctctgtctctctgtctctgtctctctctctcctctctctctcctgacagacaaccttagcatcacctagttgtgggtgctttggatacaaaagcacaaaaataaaacaaaacccaagtcttatggggagggcatacttcacagcaaaaggtgacattttaatggaaacatttactaaccttgttattaaatggaagctgggacggattgcttccagctgctgtggccgggtagccaaggggagaaaatgctttgcctccagagaagtgggagcagcccaaggttatattcaggttgggtacctcagatatagctagactgacagacttagaagaacagcggtgctcagccttggctgccctttatgggagctaacaactggcttggtcctaatacagagagtcttacttatctgaattgggtagccaatttgatagttttaaaaagtgatggggatgacactaaaacagccaggcagggaaataactgggacccaggagaggcatttttctgcagaaggtggataccaaagagctggtgataatgcaagccttagatgcagatcagtctgggaacaggcagaatgagaagatgaaagcagaaaagcttcgggcaaacccaccctatggcagagagctaagaggagccagtggaggaaaccctgcagaggttaagtcttattaattgtgacccgtgtcaatttaggtcatggtgttgattttgtacaacggccatctcctatgatctagtgtgactgtagatcaggatgtttcttaagtggctggctcatacctataaatttatgtgaatatttaattattcgtttatttgattggcagacagatggcgcttatgttaattcttttatcactgctgtagaaaagcatgatctttaatttttaccattagcaaatacccctgtctccttctaagtttacttaaaagacaagctcatggaagtagcatttttcaagaacctattttattttctgaattcaaagtcacctgtcacttttgccataaattctctgaggcatgaaatagcctgccagttgtctattgctctcaaagttaatgaatggttatcaatttatcatggataataacctaactgcagattgtaaagagggcattctatcacttccaagcacagtggcctcaaggcagtatctgccttcctatactgtctgtctattagtagcagagttcagaggcacagtgtccctaaagcctttagacagagcttgagttttgaaactgtagcatttggtaatagcccagtgaaacagtgactagttgtagcctgttgtgtgtaacagattatgtgtagtagatttctgaagtaagattgtaaataaaatttcttgatgaacaaacactgtggcagtgcaacattttaatcttattaatgttactctaaacatttttgatatacttacttctccctgattcacactccccaagtgtgactgcttcccagcctctagcctcttgttaggtagtttatgagtgtcaacacaggactgtttcaagaaaattatttttaaaaggtgggtgggacttcttggtgccttctagatttcagcagaagttcttctgttccctgttgttcactaatgttcctaataaagttcttattggggttccagtctgtatttttcaaagatgttagctaaataattttctgttctttttgttttcctcaaggtgaaaagtatgacgtggctttgaaattttctttctttctttttttttttcttttggttttcgagacagggtttctctgtgtagctttggatcctatcctggcactcactctggagaccaggctggcctcaaactcaaagagatccgcctgcctctgcctcccgagtgctgggattaaaggcgtgcgccaccaatgccaggcaaattttctttttagcacccaggagatagccatgagcgattgcagtgtgtgttaacgatgcagttctgtatgtcagaaggtttcctagtgttggactatccatccttgtgacactgcagtgaaccctgtgtctatattttatttagtgcacatctgaagtctccttgggattaacatttttgaatcaaaaataataagtgagccgggcgttggtggcgcacgcctttaatcccagcactcaggaggcagcggcaggcggatctctgtgagttcgaggccagcctggtctacagagcgagttccaggacagcctccaaagccacagagaaaccctgtctcaaaaaaccaaaaaaaaaaaaaaaaaaaaagtgaaacttaataactttattttcttttttttgtggtcctgagaattgcagctaggcaaccgttctaccactgactgcatgtttagctctgctggcacctgttagtgagttctgtcaagtgtcggtattagcatagtgctgcaagcatttgtcatttctccctctttctcttaccctaacaaggttgaacttttattgcttatttcagtttttttttttttttttttttttttttgagacaggatcttactttgtagccctggctgtcctggaactcactttgtagacccggctgccctcaaactcacagagatcctcctgtctccgccttctgagtgctgggattaaaggaaggaatgcaccaccacacctgtttatttatgtgcatgagtgttttgtctgcatgtatgtctgtgtactacgtgtgcgcgtggtgtccacagaggtgagaagagggtgttggatcccctggattggaattatagacagttctgagccaccaggtgggtgctgggaatcaagtccaggtcctctggaagagcagcaggtgctcttaaccactgagccatctcttcagccacctagtttcagaattttaaaaagatgttaaaagcagacctgtaccatttagttctgctttaagcttttatagcttgtttactgttacttagtaacagatctttgggggcttaagtggctgaggttgttgtggggaaaaagtaacatttatggagcattttcttagtgatttgtttggagacagcatctcattctgcagacgtggctggcctggaattcactgcactaggaaggccttgtctcactcctggggtgctggactgactgcagctgtgaatcacaccagccttttcttaggcatttgaacaacagtatacttctcctcccctccccatctcatcccttccctgcccatcccctccctgctctttgagccaggatctcagtatttagcccaggctgacctaaaactcctttcttagcctggtaagttctggactttcaagcgtatgtcaccacatctagctagtgtagtacttttatgtactcattaaatttggattttgcatggaggattctcaagtcagaacgaaaccctgaatgcatctctatgcatacatgtacattttgtgtgtatatattatatataccctgtaacacacacacacacacacacacacacacacacacacacacacacacacacgttttgttttttgagacagggtttctctgtgtggctttggagcctatcctggcactctctctggagaccaggctggcctcaaactcacagagatccgcttgcctctgcctcccgagtgctgggattaaaggcatgggccaccactgcccaatgaataaattaaaaaaaatagattttgtgttttggactacttttgaatataaaagtatagagttagcatatgtactgtgctcctcaaataaatataactgctctgtatcccacaccaaaatacaattgttccaacttttgtttcaattgacacatcatccaatatctaaagtttgcattaagattcactaagtgttgcatcttctcaagtcaatagtgacatgtgtcctgtcctgcctctcccgtcctctccctgaatcctggccatctttgccctttttttgctgcctccgtcgttttgccttttcccgattgtcacatgtttttggatcatactgtatgtaaccttttcaaatccacttctttcactatgtaacatgcattgaatgttgatccttgcttttgtggcttaatagctcatttccttttagtactgaataatccattgtctgaataaaattctgttgcttttgaatgactaaatgtcttaccccgagtcttgtcagtgagctaataaatacttattgaaagccagcaaagtactttgccaatctctttggctctaggcacacaaaagtgatcaaaacagaaaggaatgttcccttgtggaatctcctgcatgtttgtggtttaattatgtttgccttctggcccatcagtccatttgaagagtctgcccttctttttgggacttttcaaatgtgataatagctaggcatttccactaggtggcggtagggtcatatataatgaacagtttgtacggcaagccactattttgtttataagcatagttctttttataataagttaaatttaattgcttgtaataactccccagatataatcactaattaaaatcatgctttaaaattatttttaaagctagcatatgatataataaatttcattatgatgtttccccccctcccaagttcacccccacagggtttctctgtgtagccctgactgtcttggaactcactctgtagactaggctggcttcgaactcagagatctgcctgtttctgcatcccaagagctgggattaaaggcatgcgccaccacacctgggaattttaaagtatacttttcagaataaatctcaactcatataattttttaaattctttgaattttttaatgtatttattttatgtgtaggattgttttgcttgtatatggctgtgcaccacttaggcagtttgtgcctataggggccataagaggatgtcacatcccctggaactggagttaccatgtgggtgttggaaattgaacctgggtcttctggaagaccatcagtgtttttttttttttttttttttttaatttgaattagaaacaagattgttttacatgtcaatcccagtttcctctccttcccctcctcccgtaccccctgcccaactaaaaccctatcacatatcctttctgctccccctggatggtggagcatatgacccatgggggggtcataagagtctgtaatatcctttgggatagggcctatgcccacccctgtgtgtcttggctcagggagtattcctatatgtggaatgggctcccaaagtccacacctgtgctagggataagtactgaactactgtaggaggtcccgtagatttctgaggtttcctcactgaaacccatgttcctggggtctggatcagtcccatgctggtttcccagctatcagtctggggagcaagagctcccgatgctcaggtcagctgtttctgtgggtttcaccagccttaaccagtgctcttaacaactgagccacctctccatccccagttcctcaaattcttgggtttgtcttcctttgattaattagacattcactgcaatcctcatacaggataggcattggtctaatgttgagggttcagagtggaataattgttccttttttgtccttgagacatcataatttgacatgggaggccagctggattgaagatacattacaatgggcgcatgtgtcctacatgtcccattagatgactttgacagatgtatacctgtgaaacccaaattcctgtgaaagtatagatgattaatgcctcagggtggctgtgtgcagattgggtaatcagagggacagtcaagtgaagatggctaaaccaggcatttctgagagaatggcctggggtcttgggtcattatttacaagttgaacttcagtgcttttgagtctccatgagctttggttttgtccaggtgattttgcattggttttgatctttttctgtgacttgtcaaaaacagtatacatgttagaaaagacatgcattaacttcaaagatgaagacctctggtcttacatttctggtgccacaacaaacacattgaaaagattctttacacagtagcaataggctgttggttcacaagattcaatggcccagtgaaagcaacaggcttccagcctgagcgttgatcatctctttcaggggccctaagcactgggtcgttttcattccttctcttgtggagaatgccatcaagaaaaccgatgtgtaaaagattctggaactcatgcaaaacccctcatagctagagagtcaggtcttgactcccaagtcctctgatttcacagcagattttccactcctgcctccacaagaagggatcttaaattacagtgaaaaaagtcacaaaaataaaatggagattttatgcttgtttttatactatttgtggaaaaaaatgaagaccacacaacgacaacagcaagtgattatgtattcagtgccttctatatatggcaaagtgatcagctttccttgcgtttgaccttggggaaggtttagagtggagtgtgccctgactggaggacaaacgaagccttcaggtgtgccccgaccagagggtgtttttgtagaaaagagtgctctaggaaaaccggggtatcccagcacccagaggctctaggattgtgagttccaggccagtctaggttgtacagcaagaccgtcttaaaccaaaccaagccaaaaccaaaccaaaccaaaccaaccaatggtggggaatgtactgtgtatgttcatcttattaattattaaataaagtacttgtttggccaatgagacaacaagttagacaggactaggagtcaaagaggattctgcgaaatgtagtagagaagtggtattccagacaggaagtgacatagcaaggagactcatatttaagaaaggagaaacaggaagtgtccctcttttcccttcgcctcctccagtggcaggatgtgagccatcggcaagagagggtgccagcgaaaggcatcgtctatcattggctaagcagcatttgaacctaatacaattctctctgtgcattaattggggccttaactcggacgggtggctggcataaagtgcacacatggcggtggggcaaggcagcttttggaggaaagatttatagtaacaaaccaaaaactcaactaacataaatgatagacagacagacagacaaatgaaaacggacagcatcctctggttggttctgaatggaagcaggagaaaacctgaggggcctgtcagttactagtatagagtgctgagcattttaggccaattattgtttgactccctggccaggtgctggagaaaactggctgaactgtcctcctggaccagttgcagttggcagatgattggctgcctcagctggcttcagctgtggctcagagtcagtttgtatatggtcttgttcttgttcatctattcattcagtctctcataatagttaagttgggattggtacaccttgctaaagggctgctgttgaagagtattgttttcgtaggataatactttgatgtttggaaagggaagggtagaggatgaggtaaacactccttggacatctggtttttttcatctccgagcattgcctcttgagtgtggtttcagcaccagcggctttggcacaaacttggcagcaatgtacagtgtgaggcaccctcagacccactcagtcagaaactggacaagtggacctggtgcttcatcttgtcacaagccacaatggcatccctgaggcattgcagtggagacccacttgctgtatagcaagttagactaaatccccattttacagttaagaatagtgaggttcagatcagcatctagccttggaatttcagggagcaatggacattgcctctagactagtctgactgaaggccatgaattttacctcaataaattccaaagaaacttgattcattcttagacctggcctaacaaatttggtttcaacacagatttagtcctaaaaaaaatcagacaagaattttgttctgttcttattctggagcccggaagtttgtaatcaaagtgtggtccacattccttcttaagaccctggatccttccctgcctgtgactcctggcacaccttgacattccttgctttgcagttccacactccagtttcagcctctgtcacatgactggcttcctgtgcatctgagtcccttttgctgtagggacatttcagtgcatatagagctcaaccaacataaatgtgacttcatcttggagctcaccctactcaagcatgacttcatcttagagcttaccctactcaaatatgacctcatcttagagctcaccctacataagcatgacttcatcttagctaattatatatgcagagaccctgtttacaaagagagtttttggggtatgtactataactctactgcaacgctctgtagaaagtcagctgacaatatgtaagtttatggttggacatcctaagctgttccgttggtgtctgactatcagctaggctcacatcacatgtgatcatatttgctgtagcttttaaagatgtcttgacatcagatagtgtaagccccctgactttggtcatcatgaaggttgtttaagctactttgagtgctttactttttggaataaattttaggattatataaatttctatagaaaagcctgctggggttttgattgggattgttttcaatctattgaccaatttgatttcttcttagttggagtcttttgttcctctggttaggcttgctttttgctgcttttcaggagtggtgtgaagtggctttgtgttgtgtggatccacactgcgtcttcacatgactcacggcagtagctctgcctgtcatgattgtatcctcaacacctactggcacatgacagtgcttacttagcgggtacctttgaatttgatcaaatgaatgaattgatgaatgaaggttctttttacctttgttttgttttccagtagagaaatggtgtgtctaagaaaggagatgatttgaatcatggtgttaaaacccagacttaaaaacagaaacattgccaagcgtggtagcacttgcctttaattcccagtacttgggagccagagacaggcctgtagagcgagttccaagacagccaagcctcacagagaaaccctgtctcaaaaagcaaacaaacaaacacacaaacaagtatagatgacctgcagacaatctgttgcacaattgtgtgcaatggtggattcaggcaagattcatgacggcatgtagagctgggtgaaggctttttagagtgtagagtgtgtacacagtgtcacaatttcaagggaaagtttacctttgcagtggggaatctgatgactctgacatacaggtggtctggactttacttgcctattgtgatgcaatgtgaaatacacagcaactgtgaagggtctcacaaaaatgtttagcttaaatctaatcaaatttctactgaacttcaaggaaatttagagaagcaaatggctgcatcacgaaaataaccacataaattcaaaatgcaatacacaacagagctaattcctgaaacttaaataaaagtcatgtgattgagaacaaaaaagacaacaggaaactaaagaggcagttaccagtcatgatatgtgaaccttgattagatccaggctgaaagggggaaattagaacaggatttttttttttttaatcagttggatgaatttgtgtgtagactacactagataatactatacattgcggtcacaaaagagatgattctttacttaggaatgacatgttgaagtttttagggatgggtaaggtttcttaaactttcaatcggatgaatgaaagaacacacatgagtatgtgtgagagatggaacagacatcgcaaattgctaacacatgtttaaactggggatgcatgttagtggttattatatccggagccctacaacccttttccttgataagtgggaagaaaacaatccccttaaaaagctgagtgaaacagtggagcccaataacccaagcgatgattacctgacaattaatcccccaggagaggaggcccccttgcccttccaaaggtgttgaatgaagaattgactcagaatggggcggacctgtcccctgtgatttatggctatgtgttgtgtgagctgtcctctgtgtgctgttctatagactttaaagttgagaaagaaatattggaaagacaatcaccccctggatcgagataatctatcttaggagacaggagagagcttcagaacatggcctctgagcctctctgcgtctcctttgtctctgtcgctggctgtgtctctttgtttctctgtccctctccctcttctcccttctcctcttctctccatcccgtcatttttgtgagggaaacttctacaagttattctccccccacaccgccacataccaagtatttttagtattttcatcttgtcataagcttgacattttcctaaaaaaagttgtatccccagattacatttttgtcttgaataaatcaattatttgtattaaaggtgtagtttttgtttgcttgtttgtttttgtttttcgagacagggtttctctgtgtagctttggagcctatcctggcactccctctggagaccaagctggccttgaactcacagagatccgcctgcctctgcctcctgagtgctgggattaaaggcatgtgccaccaacacccggcaaaggtagattttacaagtgcacttttctcatttttcattttggcccttaatattaagaaagttaatgtgatacaacacattctgctccatttctccaagaagtgcaaacccttgccgattgccacaggtgctgactagttgcatgtcaacgtcatacaagctagagtctttttggaaagagagaacctcagctgagaatttgcccccactagattggattgtgggcgagccagagatgattgtgggagcacccagctcactggaggcagagccacccctggactggaggccctgggtctggaaggaagcaggctgaagaagccttgaggaagttaggaagcagagccccttatggcttctcctcctgttgctacttctctaggttcctgacccagttcctgccctgttcctcagggatagatttagaagctgtaagctgaaacaaactccctcctccccaagttatttttggtcacagtgtttattacagtaatagaaagcataactaagacaccttacaattaaacctagtttccaaaggaaaacttaacaatcccacacttagcatcttagtaaaatctccattttgttgatagtttaaaaatgtcaacatttctctgatttgggcggttgtggctggagttacagatggttgtgagctgccatgtgggtgctggaaactgaatcttggtcctctgtaagagcagctatcactccagccactagagtaattttgaaattatttgggaagattaaatttaatgcattgttagatcccaccatgaatgccttgacttatttcttcttcttcttcttcttcttcttcttcttcttcttcttcttcttcttcttcttcttcctcctctctctctctctttggctttttcaagacagggtctctctgtggctttggaggctgtcctggaactagctcttgtagaccaggttggtctcaaactcacagagatccacctgcctctgctttccaagtgctgggattaaaggcctgtgccaccaatgcctgttttttcacttttaaattaatttatttttacattccatccctttttcctatgtaatataattcaacataattgtagacaccaacaatagaataagaaatacaccaatttaagttgcatacatattttcctgtgttgataaattttttatatatgagatgacttgggcatactgaagtttattctattcttaggttataataaattcaaaattggcataactgagggaaacagaaatattcctaaacctaggatatgctggtcctatgatgctatgtgttgaccctgtatgtggctacctcagtgacaggtacagacagtgatggcacagacggtggcttggctgtccctaagctctggggtccccagcactacccacagctgtgtgactaaacgactcatcatttgtttttccacagtttatttattcatttgagattattactttttaaaacagtaccatatatccatggcttacatagtgacccccccccccttttctttctgtctcttactcattttctagacagggtttccctgtgtagccctggctgtctttgagctacctctgtagaccaggctgacctggaactcagatcttcccgcctctgcctctgcctcctgagtgctgggattaaaggcatcaccaccacctccagcagcagcaaagtgacctatctcacttcttacctccctcccatccctgcctacattccctcttccacacacaattctccctctcatgttcacgttttgttgttttgtttgaggctccataatgtagtgatagccagtagttagtagagaggtaaggggcaagggccgtgattgctgatggtgttagacttgtgtggccccagcgcaggtaactacagttgacatgagttaatgattatagtcgtgtggagtctagggaagggcgtttgtagtccttgcttcctggcccctttcacaatgtcctctgaggcctagatggggctgtataaattatttctttaggactagacccacaataatcacatttcattctctgcttctccataatcttaaaaatagagttgttttttgcagttttgtatatttatataatgaatttagtagtttttacctgcatccctttcctctctccccacccccaaacccttattctgaacaagttcttgtacttaatggcttctttcatgtgatacattgagtgtagttagtttcctgactaaaggtgggcaggaggccattactggagcaaagagaacttgtgaatgacttctgaagaaaataatatcctctccctaacaactgttacctgccagtatttctccagggagggggagtgtcctcatggtcccctcccatctattatgaaatgtttgacatgcctagtcatgtgcaggtcttgtgtgtctgaccatccctgcagtgacttcatgagtgcagtggctacgtcatgtctaggagttaccttttttgctgaacattgcccccccccccccatcctctggctctttcgttgtttctgcctcctcttctgagatgttccctgagctttggaggtgatgcagctgtctcatcaaaggcaaagtagtccactgtcacatgcttgcttcattaatcattgctgctgcataccgtacaaagcttctctgcggaaagctgggtgccacactcaccccagatggtgaatgggcgttagaactccactcttgtattcttccactctctctgagttgaggccttctacttacgtaagtggagtcacattttctgtgtttcagtaactggcatatttcactcagcatgtttccaggtttatctatgttgtggcatgtatgagcctttccttccttcttaagagtagtaattcaattatatttatccacatatattattttgttcatccatttatcagttgacattttcattgatcccaccttttgattattgtgaataatgtaccataccagggcttggtgggttacaaagtaagatacacacacacacacacacacacacacacacacacacacacacacacacacactccccctcaaaaaaaaaggcatctatgagtgtaaatatgttttcaggactttgatgccagtcttttgtgtatataacagcactccctatctattgttttgttttctgtggtttcagttacccatggtcaacagttgtccaacacattaaatggccagttctgggaatacgaaatttatgtgttttaagattgtgtgttattcagggtgatgtgatgacgtctcaagctgtccggctcttgccaagaatgtgtatcatccctttgtccagtgtatccaagctgtatattctgtctgccttgtcactagtgtctgtctaggtcacctgctcaactgtttcaatcccacaatgcttgtgttcaagtaacctcgattcttcatgaggactgtgaagtatcagaggagtaatgttggcaggtcatgtatgccaaagagaagccataaagtgcgtcacatataatcatatgttagataagaggagggcttacagtacaataaaatattcttagagaccacattcatatagcttttatgacagcatattataatttctctattttattattactgttagctttttactatgcctcacttataaattaaactttatgataggtttgtagataaaaggcaaaaagaaaacaataggaagtgttagtaataacttttgtttcagggatcaacaggggtatttggagcttatttcccacggatattggggaagatatctcccatagacattggggagcatatctcccaaaggggggaccgctatatacccagaagtggagctgctgattctgtgtcgattctgtttttttttttttttaagattttatttatttattatgtatacaacattctgcttccatgtatatctgcacaccagaagagggcaccaggtctcataacagatggttgtgagccaccatgtggttgctgggaattgaactcaggacctctggaagagcagtcggtgctcttaaccactgagccatctctccagcccctctgttttaatttttaagaaaacaatgcattttcagaaacagctgcatcattctacaaccccacgttaacagtgcacaggtttcttactgctccgtctgcattctgatcaacacatttccctcccatctttccctcccctccctctttttctgtggatggactttttttgtcccacctgccagttcccaaataaccacacagagacatgttattaattagaagtgcttggctgatagctcagtgtgtcactaactagcccttataacttaaattaatccgtatttcttagctactctctgccacatggctccgtaccttttctcagaatgacacggtcatctcctgttttctctgcatctctcgctgttcctgaaacagcttctcctcctccccctcttctgtctgccagtcccgcctaacctccacctgtccagctcatggccagtcagcttctttattaaaccaaccacagtgacacacatttacacagtgtaaaggaatgtgccacactcttggcctccttttccatctcctcccttctgctctcatttactcctagggaagtttccacgtgctttctgctgaacgctggcaatgtcctagctcaggatagaagtaactggggtagctgccgcagatgtattcaaccagaatctctaagatgggaacctacatggtacatattggacaagcattccaaggtgattttttttttttttttttgtaaccagacaaatttgagaaatactgattttgtgattattggtaaaattttaacacattttcttatctccttggagattcacagtgatcactagcttgttagaggataattagagatcaccctccctaaacctttttttttttttcttttgagacagggtttctctgtgtagctttggcacctatcctgacactcactctggagaccagcctggcctcgaactcacagagatctgcctgcctctgcctctcgagtgctgggattaaaggcgtgtgccaccaacgcccggcaccctaaacctttttttatgtctgtttaattcagcatttcctaacttaaccatgaatactccagtgtgtgtgtgtgtgtgtgtgtgtgtgtgtgtgtgtgtatgtatgtatgtatgtatgtatgtatgtatgtatgtatgtatgtgtgtttgaaagagataaagattttatttaacttctaatgctatatattgtttttccttttgaattctgacttaaggacctgttttgtagctgtcatcttgtgggaacattttatgattctgaagattttagccttgaaaggttttgcatggtgatttacaaccctggtcaccatattcaagtgtcaactatcaatgaattctctttgagagagggacctttgtttttttccagcatagccacatctgtctgtttataattagtgagagatgttggctttttgtggttacagtttttagtctttaagtttagtcttcttatactaaacaaacatagaaacagttttcagattcaaagtcaaagtatctactgagacttctcctgagaggagggttaagagcagttagttggcttcagccttttccatgacgacggctgcaaaagaagatgatgagtcacttgtggaacagaaaccatgagttgcctgtagtccttggaatctgaattaatttaaatgaaacctgaagttcagtacttgaagcacaccacccatctttcaaatctccaggcagaacccatgggactagtttgtacatcaggacagtgcagatccaggacattttggctcttgcattaagttcctttggacagtgcctcataggggtctaaacattattgtggctttttgtttgtttgattttttgagacagggttttttttctgtgtagctttggaggctgtcctggaactagctcttgtagatcaggctggtcttgaactcacagagatgcacctgcctctgccgcatcccaagtgctgggattaaaggcgtgtgaccacagcccctctcatcattgtggtttatcatctaccccagtagcattggtggagatgatttgctggataacaactcgaatcagtccagagatgtttctttatatctaaagttaaaaatttagatttataaaataaacccaaccaaaaactgaaaccacaaaactgtactgtcaaacactcaaataccagagatttgttgggaaacctgaagttcctttaaaaacctgttggttcagctagtatgtgtgagcagaaaagaggacacccagaagcttcagggtgatggggtctcacagattgtgctttgagcattcccagcattctataggcttccttctgtacatatccaaagcgccatggagcttgcttaattagtaatgaatgcaatgccacctttaaatattaaatgagtttgagataccatttcccaaaagcatccctgtccagtttctgaagtaaaaactggttttcgcagagtactcatctgataaatatatcttcaatttgtgaggtaaaatataaaatattttcagttggggtaatcatactagagtaattaggaaaatagccattggtttttttttctattatttgacatgaatataggaaacatataggaatataggaagttgggcgtggtggtgcatgcacgcttgttctttgagagctgaggcaggaggattgttttcgtacaagatggtggcatgaagatcaaacaagagagcaacaacaacaaagacacatgctggaaacactgtctgagaacacttcagagcactgcttctccccggggtgggcttatgctggagaccaaagccaggacactgctgggtgtgtcagacaagtgtcctgcccttgaaccccccccccaacagtctcctgttttatgcctgctgttctaaagaaggcttaactttgggacttttgaaattactaatttatttctgtgaatctctaaaatatccatttcatctacactaaataggaaaaacatggggcattatctttagatttaagattttgtttagcaagtaactgtaaccagttggagtgtttgcatctcctaaaaataaacaataaaaatactgttttgtttttctatttggacttgatctaagcaaaaaaacagagtggatttttgttttttctttttctttttctaaagcagttttgggacttgatgcagctgtaaaccaaagcataggagtggttggtttctggacattttgttttctgtgtgtatgtgtatgggagtgtgtatgcatgtgtgtggtgtaggtacatgtgtgttcagggggcatccaactgctcagatgtctctgccttagtcttttgagcacggtgtcttcctgaacctgtttgtggtttgcttgtttgtttgtttttcaggctaatgtggaagccagcaggcctcagagatcacgtctccgttcctcccagtgctgaggttacaggcacaatgaggccacacctggtttattatgtggatgctggggttcagctcaggtccccatgtttgtgctgcaagtactgttagctactgagccatttctctaggtcctggatgtcttttttctttcttggatagttaatgccaagaatagacattaataggaaactagcaatgaatgcataattttgtttggtagtttacagatatttcatgtagtataatgtaaatcttgactacaaatgggcttataaatatgtcaatttttgttctctctccctctctctctttctttctctctccctctctctctctctctctctctctctctctctctctctctctctctctgtgtgtgtgtgtgtgtgtgtgtgtgtgtgtgtctgtgtctgtgtctgtcttcttgtctctctgtgtatagatcagaggttgacagtcaggtgtctttctctatctttgtccaccttgttttttgagacaaagtctctcactgaacacatgcctgcctcttacccagctctggggttgcacataaatgctgccatgcccagcttttatgtggggctggagattcaaactcaggtcctcttgcttcacagcaaatactttacccactgcagcatctttctagtgattgagtttttttttttttctattttcttttcttcttctttttttttttttggtattttgagacagggtttctctgtgtagctttggaatctatcctggcactcgctctggagaccaggctggcttcgaactcacagggatccacctgcctctccctcccgagtgctgggattcaaggcgtgcgccaccaacgcccggcgagttttatttttcttattgaagaatttaatttatatttttgtaatatcaatggtctataatagagactttcaccttttccttgaaaatctcaatacaaaattttatatatatagtaactgaaactagtaaatactaccttgttacctgcaacccagtatatattttattaaattcatcttcattcccttgttcactttacttaataaaaaaaaaggctggtaatacccttttaaattgattttacagcactctaatgggttgcagctgactgtgaatctcctgtcatctccaaggcagaggtcagcagtcagcagttggtaatggaggggccccgtttcttctgtctctgtgtgagacgaatgcagatgcccttccctcaaccgccatgggcgtccagattcgggctggcctctgttggtgagcacacaggcctctgataccggcttcattctctcaccttgggttgttcctcatgttccacgtttactgtggtcttggctactctttctacttcccccgccccaggggaaaaattgagatacaatttatgtaatatgtaaagcagcactagcaattccagaacattccatcaggccttagagcagtggttctccacctgtgggttgtgactcctttggggtcgaatgaccctttcataggggttgccctggtgacaaaactattgaacatctttttaaaaagacatttattgatttgtatcttaaagtttacatttatttattgtgtgtgtgtgtttgtgagagtgcatgcatacacagaggtccaaatgacaccttgcagcagccagttctcttctttcaccaggtggggtccaggaattgacctcaggtcctcagccttggtggcaagcacctttacccgctgagccatctttccagccctgatttttttaaattagcatacaaactaatgggcttcagtttatactcgtatgtcatactttgtcgaacaccctattgtatagaaaggttcaaattctttgcctatttcttaattggcctgactctcattgttgaacgtaagaaatatttttataatttaggtttaaaacttttgtcattatgtggcttttgcattctttcttctttcctttttcttcttttggctatgggtctgatggggataagatccagccagagccttgcagttgctgagtctcacagtgtgctgcaccgagtttgcctgggctgctttcaggctcttgggctcaagtgcttttcctgccttagtctctaaggagctggcactagaggagcaaactgtcaggcctggcttgcttttctaccctactaactgtgccctttgataaagaaatgcttacatttgatgaaatctattttatctttaaaatacatactatttataattttggtgttgcatttaaagaaattattttcaggagtggtggcccaggcctgtaatctgagcccctggaggcagacacagaagatcacaggttcgaggccagcattggcagtatagtttgtccctttctcaaaaaacagaaacaaacaacagcaaacaaagaagcatccaaaattgttacctaatttaaggttgagaagatttatactgaatttccttctaagagctgtatgtttaatgttacatttaggtattggatgcactattttgagtttatttcgtatgtggagtgaagcagggattaaaatggattcttttgcatgtggatatagagtatccatatcttagaatattcacctctgtattaaggaaggagaatgtgaattttcatggcattttaattcagcaacaccagctttggagatatttattaataattaactacttaattaatttctgcaccacggcacatgtgtggcagtccgaggacaatttacatgtattggttgtttcttttagcatgtgggttttgggattgaactcaggttgttggtcttcgtggtactcatgtttacccactgagccaacttgctggattgtcttttttcttaagcaactctattaaaacatcattacataccatagcatttgtgtaattaggtgtatgattcagtaattttgagaagggagagaagctagaagcacatccaggaaatagaccacattccagaatgcatgagggtcaccagtgaccataatttttggtgtgcctgtgtgcatttgtttaaagagacaaaatgttaatctcttccaaaaaatttagctaccagtgcatttgcctcttggggatttcttggttgtttccaaggttcagatgtaggtaggaccaggtttctgttttttttttttttctaggaaagggaaactggaggcagagcttagttaactgcctctctcagagacttgcaccagctgtctctcatcattcacttgtgagtttgtgtgtagagcatcttgagggttgaaaactcatttactatgtgtggttttagaatagaaatctgatcctgtgatacactcacagaggaaagatagaaataaaagaaagtactctactaactagattatattttccttttgttgacatcatttatattttggcaaaaaggagttggatctcttaaagaattctgtctgaacatttgccagtccactgacatttctagttaaaaaggttttctgctttcaaacttaacatacacctcctctcttgcacagcagatgggaaagatcaatggacagctatagagaattacagggcttttttttttttttttttttgctagttatttgatctttgatcttaagacaacttttaaccttgtagtaatctcccaagagatttaatattttgtgaagcaaaattatggcaaccatgaatgtgtaattggtgttctgaaagcgctctgcctaaatatgaagccagtgcttttaagaaatcattatcagctgttaagtgttttttattaggctgagttcttagtatagtttatgtttaaatgcattattgcaatttggttttgaatttactgttagagaaataatgagacctttcttgatgatgtatcaacaggcagaaaaaaaaatcccagccatgaacaactcaaactctccagttaggcttaacattaaaaattatgctgaaatactttaatttggaacattccttttaagctggccccctaacgaacctacccttttagtaaacaaattcaggcattaacagggaccaaatcctgatagggaaagagcgtggcttctaaccttaaaacacgacaacaaaacaaaacaccatacaaccacataactgcagagagcagagattccagggcagcccaggaaccagaggccgaagaggacaggtacttacctgggctacacataggggtacaccactcagaattcagatggtaatggaatttgtagctgctgtttgtgggcttgcaagaggggatggagtccctggaggctggagggaatagttaatacctaagtgtaggctttttctccacaaactgccagatactccccaaacaggtaattcctttggtggtacaggggaagggagaacagttgctgcagatgcaacaaggaacttggccaagacccggcttccttagcttgtcctctactgaaaggaggtagagggaaggatggtgggctggccccgggggcagagcttgtgcctaacatgtacgtggcactgtgagctccatctccattaaggaaaaagcaaaaatcactattccccttagtgtacttgtacaaacccgaggacctgcacgagggggaaaaaggaaggctaccctggagggagggtgtgagcccgagctgcgcttgggggatggcaggagcacagagaaggcaagcccctggtaccaaaggagagagtgaaatcagaacgctgccatttccacagcagtgagtactgagtatcggaggactattgttagaggcaggaggactctgacggacagcataaagtgaaaaccaaaaccggtagcaagcactgagaaaggtctctacaaacaacacatcctcactgtgaaggcagctcaccccaggactgtgtatgttgacggtaataaacctcaaacccaacccaaatgcctgctcagtctcagcccaagggaatagaaaagaaggagcatcatttcttttttctttttttctttggtttttcgagacagggtttctctgtgtagctttggagcctatcctggcactcgctctggagaccaggctggcctcaaactcacagagctcagcctgcctctgcctcctgagtgctgggagtaaaggcgtgcgccaccagtgcccggccacatccatttctaggaattaaaaaccattactttaaatctaattttctttgcaagatgtctagttttggacagagtggaagacatgcaaaaagcagttccaagagacaatgaagtcaacagggattggaaatatataaaatagcggggcagtggtggcgcatgcctttaatcccagcccttcggaggcagaggcaggcagatctctgtgactttgaggccagcctggtttccagagtgaatttcaggacagccaggactacacagagaaaccctgtctcgaaaaacaaaaaaggaaaaacaaaacccaaaaactttaatgaggaaggaaccgagacagttttagcagattgctaaaatttataggaatatggaaaaaaaaaaaaagaggaacaaatccccaaagtaggtttgatgaacttgaaaataggttaataaaactgatgaaaacatgaaaaggagaaagagcagaaacaaataaagtcccctcaggcagatgagaggatccaagtgctaatgtgcagtatcagtgagtctgaggtgagcgtggctggaagattcactactgaaatcactctggagaaggctaacaggtcaggtgcacagtgttgcttcctggtctccattatgagtctgctattgactttaggggaagctggccaaatgacttacacttaaactttaaagattgaaaagggttttttgatgttttttactcctttgtctttttgaggggcccaccacccaactcccaaataaatacaaggagacttattcttagttaagaatgcctggccttagcttggcttgttgctagccagcttttcttaaattaacccatctaccttttccctctgggcttttatctttcttctgtatatcttactttcttcccttcttactgcatggctgggtggctgggtggctgggtggctgggtggctgggtggctgggtggctggatggctgggtggctgggtgactcaggctcctcctctcctcctcctcctgttactttcttctttctcctcctcgtttctccttccatttataccccccaccgcccacctgccagccccacctatccttgctcctgcctccatattggcggttcagctcttaattagaccatcaggtgttttagacaagcaaagaatcacagcttcacagagttaaacaaatgcagcatagccacaagtcacacaccttaaaataatattctaccacagagtagagagagctagttggatggatgatgtgggggagcatttccttgacagatttcaattcatgagtacagagggatttgggaaatagaaaatgagacttaagtacaagcaatgattgctacagtgtggtccaatgacaagcggttgagatggcagggtatttgcagagtttcaaagtctttcctttgaacacaggggtgttcctgccccatagtgtgacctaatactctttaacaatgaggaaaccgctctcctactgactattactcttcagaagtgttacatgctgggacctggaagatggtgcagggactaacaggtcttgctctacaagcctgatgacctggatgtgattcccagagctcacaggaaatgctggatgctgggctatgcacctgtgaacccagcactctgtgatgaggtgggaggagggtgccagctagcctggggtgtgatgctcgaaacaagagagaccttgcctcagaaagatgaatgtcaggaactgactcctgaaagctgtcctgtgacccccacatatgcatgtggcacacacatgtacacactttaaaaaaattacatgtcaaagacaaggaaagacttggggatttttacagactggatgaagctaaggaaatggaaatacatcacagaatcagaaaaaaatgatgttactgcaaaattaatttgagtgaaatctgagtaaagcctatattgggtagaattgaaataatgttctttcttggtttgattatggttaagacattgttaggagaaactggccagagaattctcttatgtgttgcaacctttatgtatatttaaaatgatttcaaaataaaatttaaagaaaacaaatgtaggctttaaaaaagattgctgcctgcaatagtctgtaaaacgcaatgctcgtgtttccagttgcaggagtgcatctgtgtgttttacaagatcaaattactttttaacttcatgcttttgggtaacacttttagagaatgtttcatgcctagatttgacctaaaatatttaggccttttctttttatcttttgagtagataaaggagatttgaacacataactattattcattaaaaacttctagttttaaagattaaaatgaaaattggctattactaatccttatttttttttttttatctattcaaaactgttgagtacagccatgtgaccggtgctggctgagtccggagggacccagactcagggaggtatttgtctataacaaatttccagttctttagagaatgtagggaaaaaactcctgacaggaaattcagtatctgtgggctgttgaagtaagtgtcgtttcaatgagtatgttttctctattttctcatactttgaatggggatttctgttatttagagtcttcataagtctctgtgtccccagttcaggctgttggcattgtcaagtttcttgtggttttcctcacttagagctgcggctctctgtcctcgacgtgccgtacccagtatagagtgacccccaatacctctctgcttagagcatgtctatagccaaggaagctttgaagagctaagtacactgatgcacttttattgtttccatggcaattgttattctttccatcatcatgtaaattaatgcataaaaattagcatacagaaataatgagttttattatggtgtacatacacacacacacacacacacacacacacacacacacacacacacacatagtttatcactagggtttggattgaattaaggcttctgcacatggcagttgagtactgtaccactgagctactcatcctgtcctcttttcacttgtttttcaagacagggtctgtttatttatttatttattttgtatacagtgttttgcttgcatgtatgcctgaaggccagagggcaccagatctcattacggatggttgtgagccaccatataattgctgggaattgaactcaggacctctggaagaacagccagtgctcttaactgctgagccatctctccagccccctttcttacttctaattttgagacagggtcttatttgcccaggctagttctgaacttttgaactgacacagccaagatttcaggcctgtgtcattaggcacatgtcccatggcttcattcataaattttcaagacctggtgctcttctttatagaaattgatgttgcattggagattgatgttattttgcttaaattaaagatgcgaactatggaacatgaaccaggagatacattaaccatggagtttaataaagggggggagcgagagagcaagcaaagaaagcaagagaagagagggcaagagacgaagagagagaagagagagtgaaagtgggcagggctctgtcttttaaaggggtcctttacagctgcatgcaaacttagttcccatggaaccctgggctgactagggtactgcctgagtggattctgccaggtaacggccaggcctgcataatgcctgacccttccagagatggtttgcttacaagaagttcctgagctcagcagctcggaaagagcgaggtttcctttggcttacagctttggaaggtctgtcctgccattggttgcctctgttccttggccatctggtggcacaaaacttgatggcgagggtagttagagcgcgacgctgttcatttgcagccagagagcaaggaagagagaagtgggacaaggcccatagtgtccttcaagcgcgtgcccgacctctcaaaggtttggctacgtccgtgtaacaccacccaaggaaccaatctttcaagtgttacattttgtgggtgacatttaagactcgaagtttagcaagtggacacagatgggaatattttcagatagttgcaaacgcactgtgaagctcatccattgacctaggtaaaggaacatgtttgggctaaaaaaaaaaaaaaaaaaaaaaaaaaaaaaaaggagtgtcagttgtctcttttggcttagctgtcaccacattaggatataaatttgtgggcatgattatgataacccaaaaactgaaaacctaccagctgttcagggatgcccagccctgtcggtcccccatctccctcccatcctcagtgtcccgtctgcccttgtgctcctgctgagagctcattgcgtttgatgttagatgtgaacctttgagttcttcatgttttgatgtgtaaagggcttaggttgaattcagagaccatcaggggttatcagtctgctctgtaacaggctttgcgagatccacctcatttattttatctcatttaaaatgcagcgggggggggggcggcacagcgtgtttcatcatggggccgagttacttcgagagaagaattgtttgggaaatcagaattggtattttaagacacgctaatagggttgaggcagttcgtggaagaaggaaatgaagttcgtacagagtaacacaaggaaatcattgctactctggatcgttgtgaaagtcgcctttaatgctaagtgccactgatggcacattgcctacacacagccatttcgagtttacagtttctgatgccgtggagtacccatctgtagaaacaaatcaccttgttattaatgagttggtgatgaaggcaatatagtctccagtgtgcaatttacctgctgactggtaacttctgttatataaaactcttatttatagattaatttgtaaggtatctgagctaattttgagctttgttagtcatagattatgattttgtttgcctttatccctcggaaatatttgaagaaaagtagcgaagtatgtgtttccttatatatcgaggcctggcctcatgctgaaactacatgtgacacaatgaactgaaaaccctctcttaaagtgaaaatgaataaacccattaaaaagactcccattctaagtctcaacgcggtgtagattacatattttgggcttttgatgcacttatttctagaatgatggctctgcctacggtaccctctaattagcttttcaaaaggagtgaaacacccacctgcttacttcctgtagactctttgtgagaacaagccgaatgattaactttctaattgatgtgtggtggcataactatctgaaatacttccattaaaacaacgcaatttttaaaaagatagctaagttaaatatgtaatcgctctctagcgtaatcaacataaaagaatggatgtaattacgacgtgtgtcagtctctgtatagggcacacataaccgatggtgctacttactgtacagatgccgtcaggaaggggttcggtgttcccgtggggagagggctcgaggaggcaggcttttcctgctgttgcagtggtaccatctgagtttaacgtacctccaacttttactgttgtggccatctgcaattatgtactgaggtttaaaagcatactaatattgggtggccagaatatgagttccctcctggaatatagccggagatgtgagtttacgaactgaattttatcaacagctgtaaggaagggaacatttgagttctctagtggctaattttatgataaagtagagtctcttttaggtaaagagtagctgagtaaaactaaaattgtgaggtgtagtttggttgcctagagtcagcgtggcagacagtggccaaagcagcgagtaatttctacaacagaggccccggaaatggcactttctgggatggggtcaggccaaggtattaccttacttttgttgttgttgtttgagacagggtttctctgtgtggccctggctgtcctagaactcacttggtagatcaggcaggccttgaactcacagagctccacctgcctctgcctcccaagcgctgggattaaaggtgcgcaccaccaccacttggcaaaggtgttactttacttgcaaaccttttaaccagattttgctgatcagtttctttgctggattgggttcctttaattgaaaagttaacattttaattaaagcagaacatttatttgtgcaaaatgtcaagtgggctatgctggctaaattagtatataatttctaataatttgttattttatgtgtatttgtgctttgtccgcatatcacttggatgaggtgctgccgcgtgggtgccgggaactgaacccaggtcctctgaaagggcagccagggctcttcacttctgagctgtctctccagcttccttgaaaataatttcatctgtgttttacagctgtgttttacttagggtaagctttttgaattgggtccaggctactgcttcctgtaatagtttacaaacctgaaggctttcccgccagttactgtcgtctcagatcaaggacatgctttgctgtgaatcctgttctgaccccatgtgcgtgtcccctccatccctgctgcccagtcacacactttcggccagcgcatccatagcccggagataggttttcaccttcaatttccttctgtctttgggtgaacttggttagtattccccccctctctcttttgacatggtctcttacagtccagatgggtcttgaactccgtgatcttcttccctccacccccaaatggtgggactaccacgccctaccacggccacttcattattctcttgttctttgtccaactaacaaagtaaaaaataaccatgtcaaatgaatttccataatttaaacatttaaaccgatgtaaaaaagattgtctcaacatataatcaatatagatagtagttgctggtgtattttacatccctcccatacttttgagtatagggtctcattatattgccctggctggcactgatctcagtctgtagcacaagctggccgcagatttgcaatcttcttgcctcagccctaagtgttgggattacagtctgccaccatgcctggattcttaccagacatttaaaaatttttcatttaattttaattattttggacagggtctcactatgttgttctggctggcctggaaatcacaggaatctacctgccgctgcctctggaattaatggtgtgtactgccgtgcccggtttctattacagtttaaaacagtttgagttttatacctagctcacctgattccagactatccacctttcagtgctcaggagccctgtagtcacattatgtggcctgtagtgattgctttggtggagtcctggcttcctgtctccatccttggggttttaagcttggcttcatagttcagtggtggagcccagtatggacctcagcacgaagcctccctttccagttttgagaagagtcctgtgctcttacccttattgtgcctggtgctctctggacatattcctgaggtgaagagacatcagagaggggcagtccccaggtgtgcagtcaggaaggattttggggtctagttagttattgttccttcgatagatcatcagcatttcctcaaggtctgctgccatcttgtgttctgggctttcagagttctaggacatcatggatccttgtcagctttttattttatccacctggcttcgaaatgggtgtctttctggtcaatccagcttctagaattaagtttttatagtctcatagtgggtttagttattttgtttatgcacatttctctctgtattacttagggctcctattgcttcgataaaacagttaccaaagcaagttggggaggaaagggtttatttggcttacacttccatatcactgttcgtcctcaaaaaccatcaggccagggactcaaacagagcaggaacctgaagcaggagctgatgaagaggccatgaggaatgctgttccatggcttgctcattttatagaactggcctgcttttttataggacccaggaccaccagtccaggaatggcagcacccatattaggctgggctctcccctatccatcactatttaagaaaatgccctacaggcttgcctatagcctgatctacagaagcattgtctccattgaggctctgtcttctcaggtggctctagcttctgtcaaattgacatgaaaccagtcaggatgttttcactctgttctttaacaaggtatgactttagtggagttttgaggcagcagtgaggtagcttcaggtattaagttggtgtctttcactgccagacatgcatagcttttctgtttcagtctcatggctctcctatgtatggcccatgacctgctgacgccatcatgctaggaagaaatctgcgatagacgcttccttaggtccttattttcacacagactcactggtctctacgttgcaaactctgaactgacccagcagtggaatgtgctggctgtctccctagggaggaagagaagctgcaaaggtcggaggagtgtgtacctggaggcttttcagaagcacgcaggagccgtgcagcatctcatggggagatgtgctcttccctctgtgctccttgagtagagcatctcagctggcccttttcgttcctctcttcaccattagaagatgttaagcttgcaggggttctcaactttctcctcatggccagccagtgtctttatcagcaggtaccatttctaaggatgttcacttttccatccgttgtctatggttacccaccgtgcaggtcttcaacatcacgtcaaaccccgaggaagtaggcatacaggactttctcttgggtcgagggtctgctgtagaatagtctgggaaaccacagttgcttatttgaggcattgaagaaaagatgtatcagcctagagagatggctcagcagttgggagcattagctgctcttccagaggacccatatttgattcccagcacccacgaagtagctcacaaccatctggaactccagttcctggggatctgatgccttcttctgacgtctgcaggcaccacccatcaagtggtacacaggcatgcatgcaggtaaatcacccatacacaaaaaataataaattaccaaagaaatataaatttctcatcttaatgacttatgtaaatttttattaaatttatttatttattcatttaaaataatagaaatgaaatttaaacatgaacatatataacctatcataacttccagtagtaacaatcaaaaacaatacagactagaaaataaatgtacaatacaccagttatattcacagtattgtacaaaaatcatctggttttgtttttgttttgagatgtggtctggccatgtagctcagtctgccctgccttagcctcttaagcactggcatggtagacatgtgcaggccagtcctggctggacaggttctgcaatcccagcttttcagaggctgaggcaggagatcaccagttcagtgtctgcccaggctttagagtaggtacgcactaacccccacgtctggctaaacattgtcatttctaaagcattttcatcaccctgaacaaaaattgtaaccattaagctgtaattctccatttcttcctctgctcagtgtttggtctccagagtaatttgcttcatctcaatatatcattaacaattacatcattagcaatctcatacaatatctgttcttttgtgtctggcttccttcacctagcacgtcttcagaggtcttccaagttatagcatgtgtcaggtcttcatctacagactttgcttttggatagcagtattgagctttacttgggacatctgtatggcttttagtgtaaacatgaattatttatccccctcttaatttttgaactgagtatcagagttttcttctttccccagtggcacggagatattgttagcttgttgagtcatgccgataaattacaatttcttacaagttatcctggtgtgtaaggttgatttttcatgtggtctgcataaaaataatagtggcaaatattcatcaagtaagaatggagatctgaatgctaaattgagagagggggtgggtagggtgagtacaagagagagagagagagaggagagagagagagagagagagagagagagagagagagagagagagagagagagagagattaactagaatatactgcttacattagccatccctctgcagggaagtatgctttcttgctctgtattgaattcttgttggtttgctgtttgcttttgttttgggggcagtcttgctgtgtactatgtggtgtatatacacataggaattttattcaaatgtaaataagaaattatcacatttcaacagaaaatggatggaactggagagcagactaagacagactcaggaagacaaatattgaatgttttatgtggaatctagagttaaatatatatttgttcttctaaacatctatttatctatttagagagtgtgtgtgtctgtgtgtgtgtatgtgtatgtgatgtgtgtgtgtgtgtatgtatgtgtgtgtgtatgtgtgtatgtgatgtgtgtgtatgtttgtgtgtgtgtatgtgtgtgtgtatgtgtgtgtgtatgtgtgtgtatgtgtgtatgtgtatgtgtgtgtgtgtgtatgtgtgtgtatgtgtgtgtgtatgtgtgtgtctgtgtgtgtgtatgtgtgtgtatgtgtgtatgtgtgtgtgtgtatgtgtctgtgtatgtgtgtgtatatatgtgtgtgtgtatgtgtgtgtgtatgtgtgtgtatgtgtgtgtatatgtatgtgtgtgtgtatgtgtgtgtatgtgtgtgtatgtgtgtgtgtgtgtgtgtgtgtgtgtgtgtgtgtgtgtgtgtgtgtgtgtgtgtgtgtgtgtgtgtgtgtgtgtgtgtgtgtatgtgtgtgtgtgtgtgtgtgtgtgtgtgtgtgtgtgtgtgtgtgtgtgtctgtgtgtgtctgtgtgtgtgtgtgtgtgtggttgggatggggtggggacatgcataccatagcatatatgcaggtctgggaacaacttgtggaagtcactttttccttctaccctgtgagctctggggacagaattcaggttataagtcttggcagaaagccccctttacatgtcatcttgctggtctcaacatgtttatatacgctatccacaccctcacacgcagcatgaagtaaggaagaggtcaagtgtgttggggggattgacaaactcctctaggtgaaagcccattttacactaaagtctcgagtagctcacgcacttcactgaatattgtggaagcggaaaaccgtctgttctgggttctgctgttgtgacaccatgacatggagccgtcacaagcaggaccagtgtgagtcagagacatttggagtcatttgctttcctctgttgttctatcagttttcaccgatccctggatttgtaagtgatggtgtgtgccatctcagccttggcggtcctctaaggaccaggttctctgtttgtctctgactgtgcctggggtgggagaagcatggagcccaagaggaaagtgattttcagccatttggaggatgggatgtgaccctggttcacacagcaataccaaggagttggtctttaatcatttcatgttcaacatttttattagcacagtacaagaggggatttaattcttagggttaatggctattcttcttatgagttttttgtttgtttgagtttctttgtgtaacagccctggctgtcctggaacttgcgctgtagaccaggctagccacaaactcacagagatccacctgcctctgcctcctgagtgctgggattaaaggcgtgcgccaccaacgcccggcctaaaggtatttaattttaattgggcgtattaattaggtgagccaaagggggcttttgattgctggacttcaatactttgatagctggaccttggtagtccgcctcaggaggaagaaatggtcaaataaggggatagaccttggtggctacctttaggactgtgatctaacgtttgtagcaagatgagggaattgggaagaagggcaaggcctgccagagccatgctcaccaagctcgagctggcaagattcccctcaatgatctttacacttaaccctattgctcactctgccctgccattgggaatagacctgaatctcatcagtatttttaattcataaaatgacctcaccttgggggtgaagacaggagagctggtgggctgaccagccctgccactctcaggcccactcagaaccaggttgtgaattggcccatcccaacatccactccatctgtgatctgccggagcatgtgaagggacaggccctgcagactaagggctgcgggatctccaggacacagggcaacaacaagaggaggcccagtgagggcccagcatagagcaacagaaaccagagtccccagaccaggccagtgactctttgcaagaaacacttgcaagtaaagatatatggataaaagggtttacagcatgactcatctacagattccatgacaagacttttcgtttattttcttttaaaattcattttcttttattctgggggcggggcgggttgtaagggtagaaggcagatatgaagggacaggaaatgaatgggattgagatgcataatctgaaagatacattaaaaagaaagaaaaaaaaacccaagaaattatccattaccccaatttttccctagtgagagtatatactgattaagtgtgtaagttccaaagtcagaacaaatacaaactgtatcatttcctgtgtgatttttggagcccctcattgactttctgtgtctttagctttcttgtttgtaagatgggaagtattttggtatcccaccatgaggttaccgtgaccacttaaagagatgtttagcacggtttctagtatgtaattagcagcagtgatagtaattattgtcaagctgcagtgcagcgtaatggaattagacaggggttgcaatgctactactgggacaactgggggtgaaggtttccacgtgacattgaacaagctgtcttcttttgtctgtattgatttccacagcctataaattgattagctttcctattaggcaattaggaagatctactatatagaaaattgaaaatctgctattattcactgctttgcagttccctgctcattttaggaatgctgaccaaaacaatcaatggtcatgccttttatcaggtaaaatagttcccattcaatgtatacttatattggtatctcgttttccaatgtctgtctttttttttttgatgaaatagataaaaatcattgagacagattaatatgaagggctttaacattttattttggaagaatagttaggtggttttgtgccattagaatccatgagtgagaaatgaaggatatcccacacagcccagagatgtgatgggagtcctgtgttttgtttttgatttgctgatggaaagtcaacaactttaggaaaatgtattcaagagaggcctcctgggtgggcaaagaaccaagataatgtggtcagccgagcaggagccctctccttacctttgggggagtgctgaggatgggagccagctcagaaccaaggtggcatagcctggggcagagaggattgtggggcagaggagggtagaggtttccattcctcaaagtcgctcttcagggataggtgttttgatggtgggtccctgactctgtggagagaaacatgccttttttttttttctctcattttatcaggaagctagtgtcgggcacatggagttctggttttcctatgatgtttggataagaaagagcaacatgctagcatgggtttatttttccctgttccctcacctttccatgtgatatggagcacgggtagaatactaagtctgcaataagaaaaaaaaataacccacatttatttatttatttatttatttatttatttatttatttatagaggtgccagggcatgcttgaactacaacatagtgtagaggtcagaggacaacttttggggaaccaatcttgggttgtcaaggttccgaacagaattacaagcctgtttttcttctttttaacctgcgtagtcatcttagtaataatcctatcttttaatttgagtaatttcaatcttttacacacacacacacacacacacacacacacacacacacacacactgacatttggaagggggctatgagaagcaaggatgttgtatttagcatatgctaatttttctaggattgcaatcatcaagtaaattaggaaaactagaatattccagtaactaacccagtgccaggattcagggattcaagccctctaaaagctacagacttcattctgttctgtgcacacctggacaagggaatggttgtgaagacactgtgtgacagcagcttcagccactccagctgtgcatgcccccggattgattgtgctgggtttgcatttgctatgtctaatatggtggccagctactagccatttgtcagcatttggaatgtgaatgaggaagttaattgttaattttattaaattatatttagctgagtaaaaatagccaagtgtgtctagtattggcaaaacaggttccatgaagtgaaggggacaaaaatgaaggaggctttaagaactttctagatgttgcagttgcgtctaacacttgttacacccccccccccccccccccccgtactgagtctgccaggagatatcatgtattcagggggtggcacctgtctgtgcctttgtggacacagaagcacaaagcatagctcttcaggcacctgtagtctagcaggtgtggacctcatagttcagcagcttttggttcctagtactgctgagctggctcaaggaacctttaatgactgcagcatctgtttcagacccaggtgttggaaattgtctctcttcagtcagcacagatgggacctgaagccaggcctcagccctggagagctaaaccattaacccttcatggtagtcatgatgcttttggtcccagcagctgtgtttgctatggtatatgtaatgcatttccaacaccaaaagtttcctttgtagctatcatcataaattgaattcagggaaggtaaatgaagggtgagctatgttggctagctttatttatttttaaaattccagcattagaacaacagtaggttggcaatgtgtgtccatttatagagcagttggattctatctaacatgtacccaaacaaatgcatttctgtcagaaagttggctttaaatcaaatcagggtatttgagacgtttctattattaagttttatcataaatgtgggattcaatatagatctatgcttctttctgcattttgagtctataaaatggcataattgcttagtcatcaagactaatttttctttttctttttctgagacagagtctcactgtgttatgtgtctggccaggatttactgtgtagaccaggctggccacaaaatgacagaggtctgcatgacatgtgccactatgccctgagtcatacagaattaaaacaaacacgcaaataaacaaaactcagcattacattttgaagatctgtcatgtagttttagtttgtcttcactgttgtctgctactccattgggtagcatataccacactttatccatctttatatcaatgagctctgggctgcttcctagtaactcgtaagaattgttcatactttgagttgcattatcatttgaatagctatgtcatgagaggagggacccaaaggagagggaccaggaacacaggatacacagtatttaaataggttgaggagagggtaactgtaacacagtgttttccagcttcctggagccataacaaagcctgtatttagtgagcgaatgaagagacaaactgagagagtaagaagttcccaggatcacacagttggcaagaagtaggctgggaacttcggacttaaatcccttagagccgtggttctcagccttcctaatgctgtgaccctttaatgcagttcctcatggtgtgatgaccccaaccataacattattttgttgctactttataactgtaattttttgctgttacgaattgtaatgtaaatatctgatatgcaggatatctgatacgtgggaaagagtcattagactctgaaggggtccctacccacaggttgatggtttttgccaaggggtgacttctacagtcctgatcacatgaccaggagaggaggcttaaatgaatgaggattctgtggcgcccagtcacttagactaataggccggcattgtacaagggtggcttgagttcaaggtcactaaacaaagggaagcaaatcaaaggaactttagattaatgctttccgacaaaaattgctctgacctcttctggctgaggctaggacttctgcggtggaatctgtgtccttaggcttgtagcaatccttcttcagacaggccagaggtgaaaaacctgtgaggatgggatcactcttcatcacccacaggcagaataagcaggaacctgtcctgtcagtgagtaatttgagacagggtacttgtacattggccagctgcccttgaactcttgggcacaaggaatcctctggagtagccgaactccagatgtgtgtaactatatatacaaccatgttaattcaaagttacattttatttatttatggtgtatacatgtgcgttgtgacacacaccacagcctgtgtgcacttgtgaaagacagaagacaacttgtaggagctggctctctccttctaccatgtgggccctggggttgaagtctggtcatcaggtttcatggcaggtgtctttacctgctgagccacaccactgtcccagctgtttgtctccaccagggaatttttatgttgagttggggaagcatagggtatcagcccagcttcatttattatctagtctgtattgtttttgattgttactactgtaacctatgataggttatgtatgttcatttttaaatttcatttccattaatttaaatgattgactgatactgcaagtcagggctcctgtagcccaggtgattgtgaagctgaatagagaaaaatcttttcttgggaaatctcagaaattggccttcacatagcaagtgcctgatgtccttgctcatgatttatttaggtatttagcagtgccattttagcttctaattaaaaccatatctgccggtcagctgttttgaagcctgacacagactgaatcatcagatcagcctgaggagaacttgcagaggtgagcctcacagctcatacagtggtccctagtctctatctagggtgtgaattggggcactgattcacaagaacaccccaagcagctcagagtcgctggagtctattgagtcgaggatgaaatgcaggaggctattacagacactctgtctctattaacctctcttgcccttccatttagtgtgacggatagagggacatgtgccctgatatcacagaggtgtcacatgctccgatgaggactcttccctaagaaggaagtgttaatcatcttagcagattaagactttaactgttttgaacagttttacttcacattttattatggagcttaataaattagaaaagtatatgattaacaagtttaatcttggatttattcattagggcgggtaaacacctgtattttgatatgaaagcaaaaaatccaatttgttaatgccaaacatattgaggtaatgagaaatacctcaagtttatcttttaccattctgttggaaaaagaaaggataaaggcagtatgctttgtttcttatcctaggataagataggtgtgaacgatcttaaagtgctggggtacacccaccagcattggtaagcatcaattctgcagtgtttccatctctgtgattatcgtgtaccttaggatttggagattaacattattgtttcctatttgaatgacttgtcctctgtctacagtttagctctcagtttctggaagctttgctttgtaaaacatcacgtttgtgtatggaaatttacctcgatgctgtgtcgctgtatcactctgaacacatttttaattaaaagtgtatacataattatagccagtttcttttgattcataaacttcaacacttagaagctttgggtgtgtgaaaaggacaggaagtacgagaatttccttccacataaaggccttctcccagtgttcctgaaaggacacatgcctagacactgtgtacttcaaagttttttaatcttgtttagggcaatgaaataatgttaaaccactttgggtcttttattacacagtttatctcattcaccatgactgctttcctctgatatatctccaaactttttgtttttttatctcagctagtctagtctggaagaggcaaggattactcttttggacatgtatctagtgtgagaaaccctaaggtaacagttaatgactaaccaaccatgctattgtttcttactattgtttgaatacctcacataatttatttgtctatctgtgacgttggacaatcaatccaggtgggctgtcttgagtcatacttctaaatcctcaagttatctatataaaaaatgaaggttaaaaaatgtttatgccttttatcccagcactcgggaggcagaggcaggtggatctctgtgagtttgagaccagcctggtctacaaaacaggacaggctccaaagccacagagaaaccctgtctcgaaaaacaaaacaaaaccaaacaaaaaaataaaaagagaaaagtgttagttgccttacagttatatgttttcaggattatgtatctgagacatgtagcatttgatcttttctttctgtttgttttgcaagggaatctaaggaaaacagagagaaagatccaagtttaagataatcctaaagcagagccagagtcttcatggctccttgaggtgaggtcagacttcttagatgcattgagagttcctattgatagtctgccaatttattgattagaactgttaatgtctgtgttcttatttctcatgtttgcttacacatgtggttgtcaagttggagttactgaatcacagttagggatgatgaaaattctctagggtaacatgtctttataaattcataagtaatacaattcagtttgtagcctggttatataatatatatttttttttgcctcaaaaagtgacatttattcaaagagagagagagagagagagagaaacaaaacaaaacaacaacaaaaacaagatgtccatcccttggctcccttttctcccccctccagttgttcctcagccccccaggactgaaccctgactagggccaggtagcacaacagcccctcaaatgagatcagcaacattgaggggcatcttttcaatggaggtgctgtagaatgtctcaatgtctagaagagtcctcttgtcttctgtcaccatattgatagccatacctttacggccaaagcgaccaccacgaccaattctgtggatgcagtttccctgttggtgggaaggtcgtaattgatgactagggagacctgctgcacatcaatgcctctggccaacaggtcagtggcaattaatactctgctagagccagaccggaactccctcatgatcacatctcgttccttttggtccatatctccatgcatggcggaaacagtgaaatcccgggcatgcatcttctcagtgagccagtccaccttccttctggtattggtaaagattactgcctgggcgatagtcagggtttcatacaagtcacacaatgtgtcaagcttcctctcctctctttccaccttgatgtagaattgacagataccctccagggtcaactcttctttcttgacaagaacccgaatggggtctctcatgaacttcttggtcacctcaaggacatctgagggcattgtagcagacaacaaaactacctgtgtgttacagttaagcttttggaatatatcatatatctggtccttgaaaccatggcttaacaattcatctgcttcatccagtacaagcatctcgatatatttgggggacaggtatctcctgttaagcatatcaaacacccggccaggggtgcccacgatgatatggggagcttccatctgcaacttctgcacctcagcacgcacattggtgcctccaatacaggcatgacaagaggcacccatgtagtctcccaatgccatgaccaccttttgaatctgctgagccaactcacgaacgggtgccagaaccaaagcctgagtggccttaaggtctaactcaacctgctgcagaattgatatggcaaatgtagttgttttcccagtcccagactgggcttgagcaatcacatcataacccttgatacaaggaagaatggctcgctcctggatggcagagggcttctcaaaaccataggcataaataccacggaggagggattctgggagattcatgtcatcaaagctgtccacaatctcattccagttactctcgatgacaccttcaggctccatcccattggggccattgtctctggatcgagaatcctgactcgcagacatgatccttagaatcccaatatatactatttttatatttacagtatagaaatataaagtccttacaggtagatatgtctctttctcatcttgattctttttcatggtttattttggctcagggtttgagggtaaaggccatcttggcaggtcagtaatagtgtcagaaatgtaaggcagatagtaattgtgtccatgtcaggacacagaagagggaagactgttgctcaacaccccttcatcttctgttcagtctgggatctcactccgggtgtgcttcccttaagccttcacttaagactttctggaaacatctttataggtattcccaggagtatgtccatggtgatcctcaatgaagataggaagattacccccttgcttgtttaaaccgtgtgtgtgtgtgtgtgtgtgtgtgtgtgtgtgtgtgtgtgtgtgtgtgtgtaactataagtctttactccatctgcccgagccccgccaccacgtgggcacccagaataacatacagagtcttaaattagtttacaatgctgctggccaattgactaggatttctattttttttttttttaaagatttatttatttatttatttattatgtacacaaatgcctgtatgtatgtctgcaggccagaagagggcactacagatggttgtgagccaccatgtggttgctgggaattgaactcaggacctttggaagagcagacagtgctcttaaccactgaaccatctctccagccccttgactaggatttcttatatgctagctcagtattagttatcataaatctatatattttataagacttatcttatcgaggacgccttccgctggcatcctcttctcgggatcatatggcggctccatagaatggaaagcaggaggaagagcaagagagcgatatcctgcttttagagtctgcctgctgtgtcacttcctgcctggatctctactacatttcccagaatcctccttgactccacctatcttgctttcctattggccaacagtactttatcaaccaataagacaaagatacacagaaggacctccccccttgtgtgtgtgtgtgtgtgtgtgtgtgtgtgtgtgtgtgtgtgtgtgtaacacgcatgcacaccagcaggtgttgtatgtgtcatgtgtgtgtatatagtctgcttgtatgtgtaggcctgaggttgatgtcagctgtctttacttcatcactttctatcttactaaacccgaagttcatttatttggccagtctagtctggctggcagtgatcttcagggggctgtttcttcctctctactactggggttggaagagagcacttttttacatggtttcttggcatctgaactcaggtccagatacttaggtggctgttgttttactgactgactaagctatctcctcagaagcttaaatcaggttttacaagccatctaggcactcatgtacccgacaccggtgtctggttatcttagctgttctttaggtgatggcagagcacagaggtggtgatctgagtccttagtcccttggtgcccatccccctgtggtagttagtgatgcttataatccattagtgaagatgggtgacttttcaaaggcagccgacagccactcatttggtcctgtttacttctagagagccccttagggcaattcaaatgactctttgaaaagcatcaatttgtctcaggttgaagggaaatagaaaaataaaatattttcctgtagaactgcatgagtgatgttggcattgaggtctcttttcctggtgcatcagaacattttggggacagagaaaaatgacttgtctctgtacttggactttgactgtgctcatggacttacatagtaatatactgagagcctgcccattctaaaggagctatgttttcagatctgtgctgctattcttgattagttttatggagttgtggtaggaaggctgtcgtgtgttttaaaacagagggagggagttagaacctctttcttgttgagcctggctgaccgagatggatctctttgacaagtgaccaaatggcttgtctcacatagcacagcctaacaaattcatgagttcattgctactgtgcttattgttcagtttctttctagaaatagtacaggcttcagtaccatgcatgattcccaacttttgactattctgtcctctatgaaaatcctgggattcagtgaaacccaaagcaatattctacaggttggtggagatgacgaaggccccgtttctggaaaacattagctcttcaggtgttattgggccttgctgtgtgttaagctgcgatacttttgccttggtgatgtgatgtcggggtcttgctggcatggtcaggtttgtgtagagtggagctaaaattcttatgctagagaagcaggttcatggaagctgtcgccatggctctgttcttcaagcacaccaatgcttgcttagattcagatgtgttggagatatttggttttactatttaggtaggtgacacgaacaataaggagcatacattcttatgttctctggtacagtcctgtcccccaagaacacggaatgagacggcttattacagagagatgccggctaagagtattttaactcttagattttccaagcataattaaagcagaattcacatggagggtccgctccagtggctagtgctactgtacagttttactgcaggatgccagcaaaggatagaatgtagatcagaaataaagcgggactttttgtagaattctcttaaacatcatgcttttctcatgctcctaatcttttactgtgtgaagaaaaatgttcacacagtacatgttcaatgaaatgcattgcttcagtttatttctttgtatgcaaatgttggagaagatgagccactaacatgtttctctgattaattagagtgcaggatcaggccaggttcagttctggttctgtcatacagtaactcctatagcagacagttctgccatatagtaactcctatagtggacagttctgccttagaggaactcctatagcagacagttctgccatacagtaactcctatagtggacaagttctgccatatagtaactcctataatggacagttctgccatacagtaacttctatagcagacaagttctgttgtatagtaactcctatagtgggtaagtgatttatttttaaaacaattaaaaaatcattccgatgagatttaattcatgtccctcacgttccactcatttgctttgtataatttgttgggctgtgctgctgataccaattttggaatccgtgtgtcccttgaaacctgttcccgctagctgtcaccgccaatctgctggatcacagaatgactccatgtttaacatttgaggaactgccagattgtttctagtttctattcttaccagccgggtatgaaccttccagtgtcttctaatccttgccatgtgaacatgtctaattgttgttaatagctctccaagtgtgtttcaaagagtatatttctgaggtttttgattggcattttcctaatgctcagtgctgctggatggctttcacatgtctattggccttttgtatatattcttctagagaaaggcctctttatcttaatgaacatcttcttgttgttgcccatctttaagatggtaacaaatggttactgttctagtggagccgtaaggatttagagagctaatgtaggtgagatgctcagagtgtggctggtttgctgtaaggatcctttactcttggttatggttattataatggtttcttatgtggctaatgcttcctactgctcctaatttctccgatcagaatttgaaaactaaacgtaatcttcagttcctagttctaccaattctgtctttgctccatatgttcaattgcttgtttatctgttccaagaccttactggacacccattatgcatcatcttgttgatagatcctacaaatatgaattagcagaataaatgtccccctctagaaatcttttagacagaggtaacagaatggcaattagatagtgacatgttcttttaggtaggcgtgtgaagctgggctgagtgaataggtagaggattactaaaggctttgtagacaacctgaatgataaacaggggtttctttcatgtacagtggcctcagcattgtggacagtacgagggcagttggaaagcaaatattcagggtaaagtgagaccctcagaggacgcccttcatggtaccagagactagaaactcttggacacccctgtttgggtctggaggccatccaggcaggctttgtcctcacctttgcctcatggagaagactgagctgacctacaaggcccaacatgtttgagcagtgctgcatgaatgcagtgatccaaagcggtgctgcccaaccaggagcttagcctgtgacagtgttgtcactggccgcatctgtctggggagtagtctccagtgtcagcagaaaaccacgtcttcaatgagaggttgcagccgattaaggactatcagaaaagtgaagtcagagaggaaatctgtgtctcccaggttctagcagtcagtggataggtatttagtaggtaacgccttctttttgaaagtgaagggagatgattgctggtacctttctgacgttgtagacagtggatgatggacaacctactgatggtagccaaggagattacccggatgcatttggtacaagcaagaaaagttatccacacatccctcccaaacctgacttggctccttttactttgagattcttaataacctagagctttcccacacgtggaataaaacatgttcgtcactgcaaaatatgatacagcagaaggagccagaattaaaagcaaacagagttttcacacatctccatttttattctatttgggtcttccatagtgaagaaacccattcatgagtatggaatcaactgtttatagtcctacacactacagcttccggaaacgtcaatccttgctttgtttttgtgttttgggccttgttttatgtagttactgctgcagggaaatattaatagcttcacttcatacaaacacaagtagtttctagacacttgtgccgaggactaaaagtgtttgtggtgtttcagtaatgtgagccggttctgcaaccggctgtgttttgtatttctgggaagacagtgaagtaagaatcacaacttgatagtttttacatgtttccttctcctcctcctcttctcccacttcctcttttttcttttcaagacagggtttgtctatgtatccctggctgtcctgaaactcagagattcgcctgcctctctctgcctcccaagtgctgggatcaaaggtctgcaccaccatgcctggctctacatgtcttcttaatttctacctccttccggcttcctgttctttggaggtttccttccagaccatttccacattcacttttagtggagtccagaagtattagcttgaatgggagagtacttgatgttctgggctgggctaacaaattgaaatgtctcctgaatcatacatagtatggacatcatgtctgtgtgtgacaacaggggctttcttcattttgctactgtcttatttagctggtagtaggggtttgggtttttgctgctgcaatagccattgtctcatgacaactgagggaacatttgaggttgggaggtgaaggtctctgtatgaagctgtgtgttctgttttttaagaatttccattgggcccaactgtccgcattatttattcactgactaatttcaggttatctgccaattgcttggctagatgtcaggtaatgagaaaatagagaaagaaagaatgcagaggccatgccttgataaagagtgagggcaggaactatcgccacccagtcagagagcagttcactgggactcacttcactctgtaaatttaagtattcagggacaccagacttcacggcagctgtctcttgggagagacagatgcactttgaaaaattcactgtaaaatgcatttttaaagtgtcttctatttttacttgtcattttgatttcaaaattactccattgagggaaaacgtggccgtgaaaatcagtttaaagtttgcagaagtaacaagttattaagatattagcaaataaaatacagtaagaaggccaacgaggtggctcatcaggtacaagtgcttgccatgcaagtctgatgacacgagttcgagctccagacccttctgcagcccatggtataattaactaaaaagggagagccgcaacaatggtaaggatgtgacattcaaaaggcaatctttaagagacaattaaagtttgccatttaaaatagcacagaattttgaaacagcattgaagtaatgacattttaaaaattgtttctctaattttctcctggggaaaatggatgttttaatttaccgctattgggattctttcagtttcgtcaaggctgatcagttacaaatctccatctcccgaggactattataaatgagcaataagctgggagacggccttgtggtgaaatgggtgagcgtacctggaaaggggtgattatgtttcctgtattggaagatgtttcatcccagcccaatgtgtaggaagaagagaaagttgaagcgttaatgttttcttttctgtcatccaggtagaaaaccaaaaatattttcttctctcttgtctttgagagtgattggtattgatttgtcagcttcacaagactgagaagcactgtgatataaagcactggacatgtctgtaagggagtgtctagatgaggtaaattggggtggagagatatatccaaaatgtgagtgacaccattctgttggttggggtcctggattgaaccgaaagaaggaagcgagctgagtactgcctactgctttctgagtgtggacatcactgtctcatgctcctactgacatggtttcctgccatgatggatttcaccttgaaatgtaaaccaaaataacccttccctccataagtcacttatgtcaagtattttttctcagcaatgcagaaagtcacaaattcattgagtcttttctttcagataaaagtttataaaagttaaaaaaaatccattttgatagggatattagccttcccaaatggttatatttctagagttggctgaaaaggtgtctaggatcactgaaaaaaaaaatccttcttttggtattttggctccagcttttgtgtgtgtgtgtgtgtgtgtgtgtgtgtgtgtgtgtgtgtgtgtgtcttgccagacaaaaacctagcatattcagtaccaagaacgtcaccaattttcaattactagctatcaaaatggcaacaacttgcaaagccttgtagcagacgattattcatacaatggggaaagtttaactctgtgctcacaaaaaaaatgttaatttgctcctcaacttgttacagataccttgtgcaaggcaaatggaaggtacaagtcataattgccttttaatatcatcggagatttaataatctcctctgactttaatttccataaaggaaagattcaaaaaacatttttactgcttccaagttagaccttgatcagacagtctagttggccattggctggggctgaattgaaattaagaggggtggaagctttggtggatgtaggaagccaggaagcacagaatgtcaggcaacatttaaaactagggtcacttgccgttggtcatgagaattttaaaaggatagttgtaaagtgtctgattgaatgagtgtacactactagacgcgtgtagattttgctttttcagcagctctgggagaggcatgcaaaaacttgtttttcatcctttctgatgtggtgtatcagttctacttggatgaaatatcttatacggcgtagagttagatgagattaccaccatttgaaaacacacttagctgttccacttacctctcggtggtaggtagcctattggcactgttttaattcactttgttatcgtctcccgtggtctgcatggtagtcacacattcccactttactgcgattgctgaaggaataacttccctttcctgtaccacagccctaacatccactcctgtttaacaatctgtccatgagaaagggtcttctttgtttgaaccagggtccgtgccccctcccccccacacttctcaaaattctcctttcactgtgctttttctattcatgatcttggctgtggtgtctcaggagcagtcacaacattgctgtccccacgggctttcacatggtttctctgtgatccctcatggaacactggcatttgtgtacccattagccataaggacagtggatccaaggacagtagagagggatggtcccagtgggtagcttcctcctctgactaacatgacccagaaatttgctatccctttgtttaagagttagtaaggatttaacttgcttgttttccttccaggagggtttgatgccagtgagtaggagattcaatttccctgaaatattagtcattatgttttcttattttatactttgtatgctgtgattgtgaaatacagtgatagggaacacaggaaaacaaacctaaatcagttctgttttccgtttctcatggagttatattcttttgaccacatctgttgctttgtattaaaaatcatttgttagttatatggatggtagagtgaatctctttaattttgaaaaaggcctttgggcccaaaccagtataattactatttggcaacaaaaaaccggaagattcccgtctctaaattgttttgaatattgaagccgaagggaggtcttatgtttagcatttcctagcatctttcatttagttagagttgcagtaatttcaccactctgggagaatagcatgattttaattgagataatctttttcttatagtgtagaatttccatggagaagcagccaagcacttggccatacggcattaccatttttaatcaatcctaatgcttagatttcaaagacataagcatgaaaattctgtaaatatatattattgctgtggtctctttgcatgaaaatcatctatttagaccttatttaccaaggtatgtttggctttctccatgtcagaaaaggcaagtttgtctccatgggacttactcttgagagtggctcctcacaacacatggaatccctcatgtgcatttcctcacagaccagtttatgtctcaattgtgtgaacaatgttttcttaggaattctacgcagagaatcatccttagaactggttgtaaggtgtgtagtgctgagtcagtttgcccaaatcagtattttccctggaaattttaagtaatgctagttctaccctattctcttgtttctcagttcagatttctttcccaaggtccgctgtgtcaatcagccacacactgaaccttgggagggccactgggtgtgggtctaaacctgaggggtgattgtgtcagggcctgctctgcactgtggagttgcctctgagtataccatgctgtgttgcccaggggtgcctcagaggagggggctctactgacttccccatgtcatcacagtcagtgcctgggcccagaggcttctatcatgggtcccgaaccctgggagacttctagagaagaaggaaaatcgcttaaaagagccctgttcaataagtatgttatatacatctgtgttatagatgaagtttttcctgtataagatatttaaagcatgatttgtgtaagccagggatagagggaaactgggaggcaacatgattttttaaaaaatttccttccttccttccttccttccttccttccttccttccttccttccttccttccttccttcctccctccctcccttcttccttccttcctatttgtggcgtgtgtgtgtttgtgtgtgtgtgtgtgtgtgtgtgtgtgtgtgtgtgtgtgtgtgtgcctgcctggtgcctgtggaggccaaaggggtgtgaaatccttggagctgtagttactggcagtggtgagcagcctgacctgacatgagtgctggaaactgacttgggtctcttaccgccaaaccatttttccagcctagtctgttttcttgatgaattctggaggcttctttccttctgcctgcggatggcttcattgtctcagtggcatagatactcctgagattcctgatcagttgagatttgagggtatctataaatttccttgatctccagagactgtagactcccctgtactcataactcattgttgattgtaactgacaatcaattctgcacaatttggtttcctgtctacatttcagtagcttacactgttgtagaaatcacccatagctcaggctatccgcggagaagggactttctgactgtgccccaggagctgctgcacccaggacaacctaagaatctccctagactggatgccgtgctgtgtcttccagtatctctatgaattagtgggaggaaattcctttctgcttttttctttttaaatgtaattatttgcttttattttatgtgtatgcatgaatgcttgcatgtatgcatgtataccacaggtattccagaggccagatgagggctgtgaatcccttggaactggagttatagtggttgtgagtctcctagaggtgctaggaactgaacctgggtcctctgcaagagcagccagtgcttttagctactgagccatctatccagaacctgccttttcttcaaaacaaaacaaaacagcaaaaaactatggttgttgagagagtgcattttaaaagatctcatttattttagtaaaaatagtttaaaaatacttttaagtagaagtagaccactagtgtttgtgacttaagcaggggaaggacagatttaaaactgtctgttgctgtcactggcacattcctaacttctccagattacttacactaagaattcctaccaaaggtagaaaacagtatggagtgtatctgacattcagttgtgaatcattgggcctttgcaaaactttatccacacttcaaggtaactgatgtgtgatttatcatctcgtggaaaatttgcctccaagtttgaagcagagacatcactgggaaactggatttgtttttgagatcccttttatattgaacttctaggtttgtgtgtccacatatggctgctgggtgttggagagcccaacccaagggttctggatgcccggaaagcaccctgccaactaagctacatctcagacccattccttttcccacagatttttcttctcagtgacttgaggaaaaaagaatcaccacctttgtcttcttattgttttggtgcattgctaaaaactgtatacaaactgaaatgtgtgtgcactggtgttcaacatagccagtcaagtctcagttatgagagaaatgccagttctgagtggactcttgcctgtcttaggacaattcctttgcaaagggacatttccacaacctaaaaatgaaatacccatcactcctctcctcctctgagacaaccacactgtccctcataatacgcacaactggcattatcttccaacttagttcatgtttgttgtttgcacacgacattgagaatcaaagaaaacagtgacggcaagccgtttcccctgtgactacttcatgcccagaaatgtaccttatggattctccaacagcacaaggagtcacctggaactttacactgctggggcattttgcttaagtttttccacatttagaaaaagcttcacaatttacataaaaacctgtccttcattcattttcattcagtgtttctcctttaagtcccaggaattgcctaaaataagcagtcccttttctgggagattactagttatttctggttttgatttgatgtatgcatttctcattgttgctttcaagaaatgcagctttgtttttcatttgatgtgctttaaagaaaagagagaggagaatgttttctaaaacgcctggaggcctggatcctttgtgctttcttctgttgttctagagtttctcagcgggggtccttacccccagcacccaggctcaccccaagaggaaagtggggctctacttgggatcagtggctggtctaaaacttggaactgttttcttagatagagttaatgctgtttttggaactcaagaattaaaatctacttgtttataaaaattgtgagcaattgttgttgtgggatttctagcacagcaaacagcaattaactattgagttaactattgagttactctgggtcatctcgggtgttgtgagccacagcgctgtgctaggatgcaggctccttgctgggagctgtggaagtggggtggagcaggtgccgggcctggctgctcttcattactgatgtccccagatgtcttgattccactcactatttcttagaagtgaacaccagaactttgtgtagttggggatctctatttccaggcagcggaagtaacctctgaatgagatagacaaagaaaagagaatataggaggccaagtctgaggaggtgggtcattggcgccagccctcttttcatcctctccccctctcctccatgtttgcctgctgttcggggactggctcatcaccctctgcattgcttttcttttggcagatttgggttacttttgcttgtggtctgttggaaggctggttgtttattcctatttcctcctataattctgttgacttacatcagatctcagagccattggcaattgtttctgtccacttgtattttgggtttgttgtagatgtaggtgaccagggcgagagttggtggtcaagtctggagacttaaagtcttgttgtagctgtagtttccccatcattgtttttaaatcatggttgaatcttgggttacagtcctatttattccaaacattcttataggagttattggttagcattttctttcttgcttcattaatccattctgttgtagtattgtgtactatttgatttaaaacatttgccttgtgattttagtttttactttatgccatcattggttttctgttattataaaatgttctttttttcttgttatctgtttgtgttttgagatggtgtctcggagttactcctccctgcctctgtctcctgagttcttggaatccagatgtgcaccactgtctggctccaatttaaattcttgatttccatgtttagctcatttggtttcagtttttcttctgaatatttaatgttaaaatttttctgtattagtttagtacaagtttgggtatttccctcattatttacttaaaatatatttcctaatctcctttgtggctcttctgttccccagacaacatagaagcatgtctcacatatccaggcagaagagattctattgcgtttcctaagaaatgtttctaatctctccattgttagagaaaatgactggtcttatttatcctcctgggtactttttgtgagtggccagaggtgcttgaaaaaggtgtgtgacgggggagggcctaggccctgctctaaatgatatgacagactcagaagattccccatggaaagcctcaccctccctgggaggcagaaagaggataggatagggggttagtggggggcaggagaggaggggagggagagggaactgggattgacatgtaaaacgagcttgtttttaatttaaataaaaatagaaaaaaaaggaaaaggtgtgtgaggacacagccatttaacaggcacgagtgactcagagttactttctcgttatttgcttgaccaatgaatttccagatagagtctgtatttgtatagtaatagctacctcttgcatggtgcttcctgtattccagacacttttttaaggtccttccatatattaacttgattgtgtgttggtcatttttctcttaagggtctattatttgtactctctacattttgagacttggtacatttattactggatacgtaacagctggtgcggtgactagggtcacttatcattacgctttggccttctttctcttatgattcgtttaaccttttcctgatattgatatgattacttgggcttcttttattgtttgcctggtgtagccttctcttctcatctcctatgtctctttgtttgaggcatgagtgaattaaatttttaatccagttttatttataagtgacagtagaatgtgaagttaaagctaaactgagaccagattggttgctttggtttgccgtgtagattttggcagctccccttttacagttgcatgtgggaagtattttacctcttcttcacctaacctgtctcagtgtttcatggccggctctttctccaattcctccaggggagaggtagcaggtggtccagttctcattttcgataggatgttgttacccttgcagggtcacatggcacagcaccttcatgcttctctagctagtttgtacctactttttgttgtaaacacagggtctctcgtgtagctctggctgtcctagaactcactatgtagaccaggctggttcatcacagacattctgctacccatgtgtctgttgtgtttgaaggtgtgtgccaccacaactgggttgtatctactttctatctctcgaaaatgcattaagtatttctgaaatggacatggcaagactgctcatctttcaagttgagcatgaatgagtagatgatcagaacatggcaccgtgcctggcacaccagtaaatactcacaatgagtccttctgatttcccattgattttgttatgctctgacagttggtgctctggcctgccttgactctgtccaccaatttatggttccgccttttttttgttgttactgttgttgctcaggtgacttgggaaaacaactttgatgccttgcagtcctaatcctgcctgtctgaagtagaatttaatgaaatttctaaatcattccttagcaggaatatatgttattaagcttgataggctcaggacctagtatgtatgattttgggggtctggggagatgactcataattttctttatatttaaagtttacagagtacaatttgagaatccataatcagatgattgaaaaacctgaattactctaaaatctgagacataggagttttaaaggctcctttgtgaggagtccacagaactcttggtactaatgtgttgacctgtgttttccttgtttagtcatacatgtttctcacttgtttgctaacacggaattaattgtttttaacaggaaggaaaagctgatgcggtgttctcaatgccgaattgccaaatactgcagtgccaagtgtcaggtaagactatttgagctgctcagtgacagcttcaagcctccacctgtgcacctgcctcagttacacctgagggttgttgtctttagtgtttttgaaaacaagaacaaaatggtgattttttttttttacttgttattttctttcagtttaaatttactatttgtatagtttgaataggttttgttaagtaaggagagagagagggagaaagggaggaagaaagagatagagacagacatgttcctgctagggcaagtagtcaaagccaggtaccagtgaccacatctatcccaacacaatattctggtcacccttttagctatgaattcaatggataatttcactgaggacattagtgccttcattatccagtcacccaccaggaacaccagctgggggttcagcctttattttaatgcccatgcatttggtggtgcattcagtggcacatttcagtttcaaaccttcataccattattaaggtttttgtgaagacatatttgaagagccatatatgtttataaaaatagatgcaggttgttttggctcaggttctttttttttaagattttatttattatataaacagtgttctgcctgcaggtatgcctttatgacagaagaaggcacaagatctcattatagatggttgtgaggtaccatgtggttgctgggaattgaactcaggatctctggaagaacagctagtgctcttaacctctcagccatctcttcagcccagctcaagttcttctatgtcttgattttatttttcatatttagggactattttgtatcaacaaatatattctattatatatgtatgtgtgtgtgtgtgtgtattcacacacacatatacatacacacaaacacataggtatatttaccgtgatcataattttatcattaattagtgtttagattttctcccaaacttggtattggtaacacaacattattttgtagtttttgtatacttctaaaaattattttcatgataaacttctaatcatttatttagtggaaggatacatgcattttgcaatttaacagataatgccaaattgccttcttaaagattaaattaatttgtggtgaatatggttgttaatatctttggaattctcttaaggttgtataattaacattcagcatgaccttttctccaaatcttttgattaatcatttaataagaggtataattatgctctagtgaaattaaaaagtctaattgaaacttttgtgtttgtgtcatcccatcctcattcacatttgtgtgtgtgtgtgtgtgtgtgtgtgtgtgtgtgtgtgtgtgtgtgtgtgtgtgtgtgcttgcttgcttgcttgcttgcttgcttgtgtgtttataggcacaaacacttgcgtggagtttttttttcttccttttgaatctagaccattgttctcaggggttcttctgccatctcatttttacttttgaaattagtctcttcagaatgcaaataaaatgatcttaatggaagaaacaccatgtacaaaactctcagaggatccaagttgggatgttacttctaccactttctagttaaattatttcataggaaacacaaggtcaggcttgggtttctgagtctgcactgatgagagctaatatttgtaacatgaattaataaaagacccagagactgatattcgggtttgaacttcaagctgaatatcaagcaaggcagccggccactagctctcacctctagctcaggctgaaaggactgatccacaccaagtctcagactgctgcctctcctcagtgtggctggagaacaaatggctcttactgactctgttcttgtcttaaatacctctaatgagtcctgggattaaaggcgtgagcactgttattcttttagactgattcaatcttgtgtaaacctgggtggctttgaactcagagatccatctgcttttgtcttctcagtcctgggattaaaggtgtgtgccaccactgcctgacctttatagcttgtggctgactttgctttctgaatcttcaggaaagctttattaaatcatagtttttcactacaattcccacctttttttgtctaatacaaaaagaaggctacaagtaacataagaaaaactatatagtaagtacaataagtatatacagtatatacattcaataattacatcatcaatgtctagtgaatttgcatttgacaaattcagagaaaatatccagtccattatcatttgacaaattgggagaaaatacttcattatctattctatggttgcaggactgggtgggacagagacctctgtcaacaaatatttgttagatatcttctgggtggtaggttctgggagatagtgtttgttaggtatctgctgtgtgctaggtgctgagagccaatagttgtttggtatctgctgggtgttaggtgctgctgagagctaataattgttaggtatctacttcgtgctaagtgctgttttatttcatttaattttttagactcgtgtaatttggctactgttaccatgctcaattatcagtaaggaaaaagctcagaaaaagcaagtaaattgttacatatctcataactgataattgatacaccacgtttggggaaataaatgtacatattaataacacatgtctagattttatgcttatcttctaaatgtaaattttattcttgctataatattctgattacatctgcttttcttttatctgttgcatttggccttcgtttcttggctaattattttcactctgatgcttggtacatgcccagaaagatctttaccccttttatcccccagctatcttattttgtttttaaaagacacaaaaggaaacaatttacaatagaaatcaagagctggggggatcgttcagtgggtaaagtgtgtgctgggtaagcatgaggacccggtttagatcatcacacatgacaggacgtgtctgtaacctcaaactttgtggggatggagacaggtttgggagcagagacaggtagatccctgcagttcattagccagcaagcctagctgaatccatgaacttccaattcagtggaatacctccaaaaataaagaacagtcaaggaaagatgttttatttcagtgtttacacacatatgtacacatacgtgcatgcgtgcatgtctttacacccacaggcacataccatgcacgggagcaatgccacacacacacacaggtagaaatataaaccttcaacattttcatgataagatgaattgttaaaaacgatttttattttaatctcttttttataccaaatattttgtcaaagtgagatctaagatttcttctataagatcattaacagtaactataataaaaaacagagagagagagagagagagagagagagagaacaaacacatgccttttccacaagataaatcattaaaaatatatttttatgatgatatttcagccactccactgcctgtaaatttggtcaggtggaatgcatatagaaatgaattaacaagttatttaacacacatcttttggaaacttcatttctaatctcaatggcctaacaccacccctcgcccaattttacaaatgtattttctccaagctactttcttcagttgtaataacacatagagaaaaggaaaaagccattatctgattagaacaagtagagggagtttggcaagtgggtatgtcactttgattcattgtagtgtatatattttattacatatattacttattcactgaagaatcaataacaatgtcattgttggatataatgtggaaggcaatggaaaaatagccagtaagatgaaatatatatgttgctagcttgagtacgcgtttttgtgcgtatgtgtgtagggggtattgtgtgggtgtagactgggagtcaaggattggccagaacatatgcatttaaactgcgctagttaatcctcaccttaaggtgcagagctatatgttgtaattattgtggatacctacaaagctgtacaaaattaaactgacaaatcatacagtgaggatgatgaacagaaatgaagagaaagtaaaagcaagtggaatggaaattaatgtagagattgtgactctgtagcaaaaaaatatgtttgcctgagagggacatgactttggttcagtagttgagacttttatggtgttaatgagttgtcttcgaaaggttttggggatagttttaagaatgtaatatattctttctgcttaaagggcgctatcattgtcatcagcactcagttttcatttttaaacataagcaatacaagaacatattttcattataaaaattaaggtaatacagaattatagaggaataaaacaatggatatttcctcgagattccttttcttcattttaaatataatttgtgtttctttttgtgattgcagaaggacacaaagacaactgttcctccattttttctatatattcagtcagttagtatactcacctatatactgctgggtacaatattttttttctgacaccgacaagattatttcttcactggtggctttaagctctgtgccttattgtgggacatatatcactttatttcctagtgtgagggcaggtctccatattggcataatggaacatcaaggttgatcccgagattgtaaaggagaaataggctttttcttcatcaagaaatgttaaaaatgtaaaaactaacagcgatgttgatagcttttctggatttagtttgacttgtgaaatttgcatttctaattcacctcatcactgaataaagcatgagaccaagttctagatcaagtttcacattgcgatcttttgaaaagtgtttgcagagaaaggttctgtttcatattagcaattatgtatctctttacatacatgaatcatattttgggtctgtatttcatgtgtagttatcaaatgatttatttatttatttatttatttatttatttatttatttatttatttatttatttaggtttttttgagacgggtttctctgtggctttggaggctgtcctggaactagctcttgtagaccaggctggtctcgaactcacagagatccacctgcctctgccacccgagtgctgggattaaaggcgtgcaccaccaacgcccggcccaaatgatttatttttatggtggggaactaatccttcatcagtaagcatttcacagggtgatcttatcggttgttttctggaacaccatacttgagggtgtactgaagaaagctaacccttttgattatttcaggaatagccgtgtttcaggcctcagactgatgggatttgcagttttatttttaatctatcctgacagtatctctttttaattgtgcattaagaccagtggcactcagaatgattcttgttatttatatctatcattactatcattactattatgttactattttctgtttctttttctgtttttgtcttttattattttcctgccttttgtaggtcttaactaaacattttgttggaactactccattgtctcctcctcctcttcctcctcctcttcttgctttatttatttgttatgtatacagtgttctgtctgcatgtatggctgcaggccagaagagggcaccatatctcattacagatggttgtgagccaccacacggttgctgagaattgaacacaggtcctctggaagagcagctggtgctcttaacctctgagctgtgtctccagccctccattgtctcttcttccctttgccttttagtgttttgaggttgggtcttattgtgtagttcatactggcttcaaattcatatatccccaaatagcttaactcccaagatcttcctgcaatagctttcagagtgtttggattacaggtgtttgtcaccatgtcctctatttaggaaagcacctgtcagtgtaagagtaggaccaaatagaagaatgtagcagtcttagcatcatatttaaactggatccttcatcttaaccctccattgcttgccagtaatagggagatgttttaagacacttcagtaatctaggcttttgactatcctcacccccaccacattttagttccactctttatcagctacacagactttcttttagagttttcacatggcagggcagcctgtcccagacaaagctgtgatacccttgatggcctcctgaactgctcctgcaccctgtctttttaccagattgaactttctaatgagggctagccatccctctggtgactctgggaattacagatgctacaattacttgtgtcagggaaatacaattctctttctgctagttccacataaacctgctgttgatattttggttaacccagatggtgatttctgctatgcatagaaatccatgggagggaataatttattttgtgtctctcacagtgttggcatggtctttctgtagatggtttagcctttttttttttttttcctgtgaagggctgtatgacttattaataacttttcaactctgtcttagcacaaagagagtacagctatcgaatgtgactatattgtagtataactttccaaaactgtggctgcagagattttacttccaggtcatagttttctgaaccctgtacgagatgtactctgggctgctagtgtttttattgcctcatattgtatggattttggttaaccaagatactgtgatttctatagaggtaacaatttagccctgtttcattttctgatgacttggagtcctgtggctattcctgacctcgttccttcttcattttggccctaccttcccactggaaggggctctgactctcctgagctttctagaggtttttatgcaggattttgaccagtgcaacacctgctcagcctgcagtttattttcctagattcacgcctctggtgacctgtgattcaacttccggccttttcaaggacagaggaggacctgtcattcatttgctatcaagtactgttaagttgaatgaaagctttcaagtctcttcatgcccacagattgagggtcaactcatttattttgagttttgcccacaggaaccctttgcagataactgttggtgagcggcaggaggcatccactcggggattgttgctcccgtctatgtgaggacccatgagcactgttgattgtgtgggccgtgttctcatggtttcctttaatcctctggctcctccaatctttcttccccatctccggcagggttccctgagctccttctaatgtggctgtggatctcggcatttgctcccatcaattgctggatgaagcctttatggtgatgatagggccgggcactgatctatgagtatagcagattaactcactatttaaagatatcagcactctagtttcttgtcagaatgacggactctgccttggtctgcttagcctactctcattcgaagaccagatggaattaagcaccttactacgtcttagtcagtgtataacaacccacatcttcaaggatggcaatgacagccatgggatgctgtgttacatcatttgtacaagtttctttgcgttggaatttttaataggttaatatattttgctaagcagggtgtgtatggttttgtttttccaacttatttgacagtgaaacaatgaactttttgaacaacttgtacatcttggtgactgacagttgctagttcagtcctccttcctgtacaacaggctttttgttctaccgagttagattttaaatctgtgccttcaggtaagtactggtgttatgtagcttcccgaaaggctattagagttgtaaatataagcaatgtcaaagacactgtccagtatgatgatcagccttcttggaatccgtccctcttgtgatttaatatttagtaacatatgtcgtcctttctcccagatgagaattatggaagtcattatgttctgtttccgccttgcttataaagcaacttaaataaatgtacaaacatggcagtcacttagtgtttacctcaagcacgccaaggcgtttactatccttgtttatatttgggaagtttgttttaaatcccagatcatgagccttacttttctccgtttaatgttagcatgatttctagtatctggattactgagaaaattaaatgcaacatcttttgttaattgcttaggcatgtgtctagcacattctagaatgctaagtggatgtcagaggactttactcaattctaccagtgattttttagcattttatgtttctgctgttatgaactatttcttttacaactttcatcttcttttttaaatgatagggtttcattcagcacaagttgacttgaactcaatatgtagttgaggatggccttgaagtcctaattcttcttcctcagccccctgagtgcctggattacaggcatatcatgcttggctgtctttttcttctttttttcctcttccgcatcttttttggcgacactagggcttgaaccagggcttcacgcactctgtcactgagctatgttcccagctcttctcatacttcagtacatggaaccagtgtcatcccgcttagatgtgagtgagatataaataccggaaggaagagcattagacagcatcatcataatcaaagtgagcaactgtgagtagagctgatagacttgtaagcagcatttcccagacctaggtgtctaggtgctggccaggctgacataggaagtcttttgtagccaaaggcccaccggaacactaatacaagtcagatgaataattttcatgaagtaagaatgtgtgggacattgagtatgtcagcgatagaacatgagactgttgctcttcctgttgccctttcctcagggatggaatccgtctctttagttcactcatgtctaggtatgtgaccagcccactgctcacatcacatggttagtttcacaaatgtgctgattggaaaatttaccttcccagctacatgctttttcaaatgcaaagggctctgttataattaagcgaggacataagttatgaccttgtacagtctttaacaaactgtatattatgggttggctcctttcctttgagagctatggtctttatagttttgcatctgttagccctcctggtatgcctgacttttttttacagcaatgtggaaactcagaatgttgagtttcctgttttgatttcccttagccacttgttttagtttccagcgatgagtaatacttttatttgtgagtctgttccttttttagagggtgttggttttggtgttttgagacagggtttctttgtgtagtcctggctgtcctggaactcactctgtagaccaggatggccttgacttacagagatccacctacttaggcatgtaccaccactgtcctagtgatattttcattaagtctatcttacatattactaaatattaggtattaaaaaagacctgctggttcttactatggaatctcccagtctggtaatgaccagaggggaaaattagaggacaaggtgagctgaggtgttgatgcctttatctggtacctacctgacaaagactaaattctggatcattctcagtattacacaatgaattttgtattttgcagttatattcaggctgctgaaattacattaaggttgacaattggcagtgttcagaactggctcaaaggaaagttaactttcatctccgatacccttccctactcttgtcttcacagaaaaaagcttggccggaccacaagcaggaatgcaaatgtcttaaaagctgcaagcccagatatccccctgactctgtgagacttctggccagagtcatcgtgaaacttgtgagtacacggctcgtgagagaagcctggatttaatttgataaaagcaattgcctttcctattcatatttaaggctgaggctgaggtcatgtgaaggtggatggtgggatatcccaggcagtgcgttaagacgagaaactcatgtccctattagtcattgccttgagggccatgtggtgtacagctcttgtctatagagattttgtaatctctttcttgaatagagttttgaggtaacatgttagcatctagtacttagtatgttttctttgtaacttttttttctgtgaacacacttcacgcctttattgtcttttcaggtgaggatataattagataataatacattaaatagacaaattcttattttcttttggagagccaggatttgtgatttctgcagtcctgtccgttggcacacagcattatctgaaaccctgctctgaacacacttccagaatcttctgatagggtgtgtcataagtgtcttgcaggctctaactgggttccttcatttattcattgactttcgatttcttatttccctttactccaccctcaacttttatagaggcctttgagaatgtggaagtatggggacttcttgtaagagatttttatttggagataaaactgcttaggtgaagttgaaagttggattttaaagttgttataagtaattacaaaaaaaccctgaagagtcctgaagacaggacttggtgttagcaatgcttgctgcccagtctgatggcctgaggtcagtttctggaacccatgtgatggaaggagagacctgacttcttaagttgccctctgatacacacacacacacacacacacacacacacacacacacacaaaatgaatgaataatggataaataatgttttaaattgttatgaaaaatggcatataggttataatgttttaaaagtttcattgaagctgaatatggtggcacgagcctttaatcccagcacttaggaggcagaggaaggtgtattgctgtgtgttccaggccagcttggcgggcagacttatttccaggataaccagaggtacatagtgatgtagtgagtggtacatcgtgtctcaaaacaagcaaacaaaaaatttcatcaaattatcaaagtgtggtcaaatatacttatttatatactggagtgctcaccttgtgtcttctccgtttccttcccagatggatgaaaagccctcagagtcggagaaactttactcattttatgatctggagtccagtaagtgattattcattagtatcttaaaactaaatctgtcatttgccagctgaacttccctcactctccccgcccattatccccctttctctcttctccccagacattcagtctttagcttctagggtctccaattatgtgttacgataagtctttactccatctgcctgagccctgccgccaagtgggcactttctgccaggccgcccgagttctgcccgccgccacattaaggtcccaattaacacacagagacttatattagctacaaatgctgcttggccaatgactagaatttctcatctgctatctcagtcttaattatcaaccataactattaatctaaagacttacttacagagacaccggcagcaggcatcttcttttgccaggatcacatggcggctccagagcagagaggaagagcaagagaaaagggacaacttccttcttgccttgcttatatatgagtctgcctgctatgtcacttcctgcctgtatcacaaaacttccttttactacatttcccagaatccttcttgactcctagtcccacctatcttgctgcctcattggccaaacagtgctttattcattaaccaataagataaacatacacagaaggacattccctatcagctatgcacctctagtttttaagaattgaagctatgatctttagaatctgttaatccaacccataatcctttgccatacgagggagaactcatgatttcctcatgagcagaactgagggatctcattcagtgtgttagtaacatagctgatagtctaagtgacagttgtcttctgtttcacctccttttatccccttctctcctttcctggtttcctctccacgttagcgaagagtgctgtagtgaaccaggtacagacgacgacttaggctctgtgacagtattgaacattgctcttttcctgggctaccatggtggctgtcagctaccatgaatgccttaaggcctcccaggtggaggtgtcacctgcagtcaggcttattttgccttgcacagtcacatgtccttttcaccgagggtgtgagtggttccagtctcaaactagctagaactcctagactgtaagtgttacacagtttcccactcctggttagagatgaaggagaagatgatctctagatttacagttctaggaacttaagtgccagtggtaataagttattatttaagaaatcatgggttaattattctgttggacaaataatttgaagagaatttggaaacctgacacgaggaaggatgctagttcaatgtgatgtgtcttttcaagttttaatagagaactaattagtcattttcctttgtagtacggctggataattaataccattcacagtgaacttgactattaacattagtcctgctcagtagcaaaccattacattgcctttggtgagatgctcagatgttatcagtgtggtggcgcactcttagcctcaatatgccattcataatgacatattatttaaatatggtattataatttaaactgatgttcaaggagatcatactggctttagaaaaaaatctcactttatgtgtgttctttttttttaatagaaaaaatattattgacacataaaatctctaaacaaacttatggggtccagtatatgcatataatgtataacaataaaatcaggtagttagcattaccatttcaaaaaatatatcctttgtatgtattgggaacctttaaaagttgaaacatttttgtagagtaatttagcataaatatacaataagtcatgatcatatcagattggcaggtgttttctgtcagaagtgtatcatgtttttgtgttggggacccactgactgtttttatctgtcaagtccttaagcctgtatgctccagaatagcagcatcaattccccctagctagctgcatttggtacccagtgtccaacctctcttcactccattccccactgttctttctcacatccagtgatcactgttttgtttgagatctactctgtcctggctaacttgattgtcaacttgatacagcctggagtcacctgggaggagaagccccagatgagaattgcttagatctggttaatgtgatgtctgtgagggatcatttccattagtagagcatgtgggagaaccctgcccattccttgagcgagtggtcctgggctgtataaaacaagtaggttagcaggagcctgtgagtgagtgagagagagagagagagagagagagagagagagagagagagagagagagagagagagagcagcaagcctcgtgcattatggcttctgcttcgagtttgggccctcagtttctgccttggctttcctcagtgactgacctggagctgtaaaccagataaagcatttcttctcctaggttgctttttgtcagtattttatcacagcaacagaagggaagctagacaaccttttaaaacttcctccggtgaatgagaagatgcgctgtttgtcttcccgtgcctggctgatttcacttaacatcatgttctgcaattttgtcccagaggtgaaaataacaggctttcactattttttttttaatgcctgtgtagtattttgctgtatagatgcaccctattttcttcattcattcatcccgattccttgttttgagtactgtacctagtgctgcagtgaattcagatgggcagacatcttgtttgctcagttctgttttgtacagccactgcgtgccattgtgtaggagtacccgtgtttctgcatctgtgccagggtttattattttacgcttttgtataataaccattgtagccagagtgagatgacgtctcatcattttagttcacattttctgatgattagtgctgtggagtatttttgtcacacacctggttatcatttgtttatcttcttttgaggaatgtctgtccagagtatgtgcttccctttaaattggatcttcatcatgatttcatattgttattgagttatttttgtcactgctggtttttatttttacttccccatcaaagtttcgcttccctatcctctctcaccctctctgctctccccaatattgagttattgtgtgaattccttatatagtctagacattagtcccttgtgataaatcacttgcaggtttctcatctgttatgtaggctgcttctttgctttactgattgtattctttgtacagatattttcattgctatttgattggatcttattttctaatttttgtttgtcttgatagtattttgtggttatatccaaaagctttgtgttcaggccagtgctctaaaccttttccttggggtttttctcccctaatagttttatggtttgggatcatgtatttatgtttttgatacatttaatattgcttttgtgtatgaagagagatagagtcctagttttattcttctatacatgaatacccactttcctggcacaattgttgaagccactgtctttatgtgtgtgtatttgtagcaactttgctgagaatctttttgttgtgtgagcatacattaatttctggcctctctgctccggctcagtgatcgtatgtgtgttattatgtccatgacatactggttggtgatgatagacttgtagatgcttttcagatgagatattgtcacgtctctagctttttcactcaggattgctttggctttcctattatttcccctgttcctgtgaaagatgccattgctaatccctaggaattgcattgagtctgtacatgacttgagggagtgtgggcattgtaacaatattaattgttctaactcattaaaatgggttgtcttctttaataatctccttccctccctccctccctccctccctctctccctccctccctccctcctccctccctccccctccctccctccccctccctcccatatcctcttcagtgtctttcatcagagttttataattgcagtgggctttcacttttctggttaaatttcttcctgtatgtttcattttggggtcataattgtaacccacattgttttgcttcttttgtcatcaagtttgatatcaccgtataaaatgtcttagtaatttttatgccagttttgtatcttgaaacattatagaattattaccagttttacttctttccttatgtctggaatatttctcttcaacccaaacacaaggagaagaagtacaacctctaggctgtctctgtttgtcaaacctggaaataactaaaggttgagattccttcaagctatccaggtttttgttaggatacacattttgtatgacaaatatcagttgtttaaacttcatatgaactttatctaattttctgccctttgaacctttcagataatattgtttatgagccagttgtaacatgcttatgaattattatggggaaaagtcagtttaaattcactggtttaattaggatttatgacagtacacttgtgcaccatgttgtaaaagatctggtaacatgcaactgatttgggtttagtgtacttttaaaacctgtgtgcacatctatctgtctgtctgtctgtctatctatctatctatctatctatctatctatctatctatccatcagctgtgtgatctagtttgtggataaagttggacagaatttaactgacataatatgtatcatgattttgcagttgtcaggatagattgcatgtcaggaaatactttgtttaatagccgggactaaacacctgaaaattatccatgaagtccacttggtgattatagtatttattttatttacaaaagatattaacaaactcacagaagataagaaagagggcctgaggcagcttgccctgacatttcagcatttcacgagagaagagatacaggatgcttcccaactgccgccatcttttgacctttttgaagcctttgcaaaggtaagtttgaaggttcgtctctgctggtgatgtaagtcagtcatttacccttcactttcttgtcatttttgaacacattcattgccttgatgggacattgatgattgttaaagcctgtgtcactctccatctaaatgagcacagaatgaaagaattcagtattgcctggaccaaaaagggtgttacttttctgttttaccagtaattttgcttggaggttattcgttgctaatactgtcaacatcccctttagagagtccactctcttttctcaaaagaacacagcaaatctacttcattactgtctactgaagaattttattttagtatcgggcttactttcaatgttggttgctttagccaagttgggaaaaaaatctgttggaatctattctgattaaatgacttctaaataatctgaaagcacattctgacctaataatttaaatatcagattaatgaaatctgaagttagagacagaaaacagatttacttaatgtttcatctgtgctctgtgagtaggagttacatgaagtgttctgtttgaaaatgcatctgcaagtttgctttggcccaggcagcaaggatgcagtggtgggggatggcgaacgcccgtcacgccccacactgctctgggtctgccgtctttgtccatttgtttttaatgtttatcaccttttacgttggaagatgactttgccacttaacttcaaatttgtaaaacacatattttataacagccctcagttattttaaagaatgctttcaaaattacctacttggtaagaacttaaatgtgattattttgattgctagagatttattctagtttttcccctcaaagttatttttattctttaaagtatatcccatgttttttttttttgatactgcaatcttagcattatattctggtttgcctataatttaaagttgatttgaaatatagtggcttctccctgcttttttatttcatatgttcttgaaaaattatagcctctactagttctataggtatcgtgaacacaacttctttgactttatacactgaaaatgtagtctatgtctgatggtggctggtactttgtctctcacattgacagtgtaactcctctgtggtgtcatttctgctgttgaaaaatcttccatagcaagcatcattatgattaatattcatgtcagatatcttcaaatattgctaaatctaaaacatgagttgatgccttgttcctgttgtttgttattgttaaacttttttttttttttttggctttttggctttttggctttttgggacagagtttctctgtagctttgaatcctgtcctggaactcactctgtagaccaggctagcttcgaactcagagattcttgtgcctctgcctccagaacactgggattgaagtcaagcgccaccaccaccgggcttgttaaacatttttaaggacgtttatcttgtggaactcttgccatgttatgtatgaggaatgctctggaattgtaatgaaagggggtaaattttttggacagattttcaataataagctgctatcttctcacacccttgtagtcatgcttgctgtaaaagtggagcatgcaagaccgtggagagggctcaggtggcagagggctggctggctgtacaagctctcgacttccacctgtagcacccatgccatgcaaaggcggctgtgggggtgcacatttgcaatcctagtgcataaaaaatggggacatgtgggtccacggggctccctgacccgcagcattgtcctgtcaggaagttccgtgcctcagtgaaagaatctctctcaaaaaaccaaggcgagtggttcccaaggagccgcagaagaatgcaccccacataaatgcacacagtggataacataattgtcattgagatttggagaccatttgggctcagatttgtaacttggctttcattgttctttagtgaaagtcagaggaaatcagataattcactcggggttcctgtacatctttgctaaagtgttgtccgttaatattttgtcacttgtggttatgtttctggttataagttcatctgtaggagagaccactgtcttgcttttcccttctcaggaaaatgatcttcatcaagctaattaatgtcctgtaagacacagagaggcgctactctccccaaagcgctgagtgtataggagtgcacttgactctcgcagcacaccggaagtgggtggaaggcattgggcagagaacctttcctactcttccaccctgtacccatttattagcattttacagttagccagagagaggaaatgggcggcaccaagtgtatgccctgtagtagtctgcttctgcatgccacatggagtttgtcaatttacggaacttccatgtgtgtttatcctccttggtctttgaaataggactttacctggcctcaataaaaacaccgtgtggtctgtgttgtgtttggtctctttgttttatattcatttttgttatatgtcagcattagattcaatacacttttgtttcatccttggtctttgtcaccaaagtcctcggtatatttccgtaggagggaatcatgcttattcaagctggcccaggggaggacaaggtgacactgtggccttagatgttgaaccctctggtgcatggtggagctcttggagtttctggtggaagagtagccgctcccctctattagaccaggttcttagaatgcttcttttgttttgttttgttttgttttgttttattgttagtgttaattttttaaaatatattttctatttttataatcgtaattagaccaattttaaattagaaacaagcttcttttacatgtcaatcccagttccctcccctcccctcctcctcttaggaaggcttctaaagctgttgttttttgcctgacaaagtcctcccctcctgccccacatactctagagaccttgctgcataggtttttttttttttttttttttttttttttttgtggatcacaggtagccacaaggacttcttcgcacctgtgctggttttgcttttttcaacctcacataagtgctcacccgaacagcaattggcatgtgactcccatgtgctctatcctgatgagcctgttgctgggttgtaaagttgagcaccttgagattatatgggaatgaatccccctctccccacaccaagtgctgacatcaaggtgggctctcactgcgaattagaaattgacctgcgtttgagaagctgtgctggcagattgtacgcagtggtcttgaaaggcttgtggggagtgtggtgctctgattggctacccgctggggcatccacaggagaagcctgagaagggcagcctgtggacggtagactcagttatgtggttcttcctgtcagagtttgaacgatgccacaggcctccagaattcccacacaagaagagctgatgccgtgagctctggtgggtgaaagaaagatgcaggagccgttcataagtgctttgattgtgtagtagttgtttcttcttaaacttaaagtatatgttctttgggtcataaaactatgaaatctgaggaagggaggcagttggtaactgcctctgactataatagaggcagctgaggggcaggaggtggctggagatgtcagtgagagcatagagggggcgattattcacgtgctcattaaagacaagggtctagctgtccctttgcttcctccctgcaagccccccccacctcctcccataccacaacttatttgctcttctacttttattttctcatgaagtttctagtaaggttttaaggtggatttatctagaaaggactaataaagactactctaataaagtcttcaggttgagtcctaaacatttgctccaaatgcagaaaaaagtatatactaattatagttattggcttgcaagatcagaaaagtacagctagtgagatcaccaacttattatttaaaataattgatttcattattttatgtgtttgggtcttgctttcatgtagttacacacaccacatgtgggttgtgcccacacaggccaaagagagtgttgggtcccttggaactgaagtcacaaacagttgtgaattgcctttgcatgttgagaatcaaacctgggtcctttggaagagcagccagtgctcttaaccactgagatatctctgcagccccgagaggacagatttaaatggatgctgtgtggtatgacagttaagttgtcttctcaaagcaagaagtgaaattctcttgttctgtatttgtttatctgtgcatttgtacacacacacacacacacacacacacacacacacacacacacacacacatacacagatacagataggagaatttcactttcttgttttgagaaaatgtgtgtgtgtgtgttcatatgtgcataggaataacaatatcatctcttttgtggataagatgaggactaactgtaagttgcttggccgagtatcaggcaataccatgcatgtctactactgttgctccacctccctgcattgttggtatttgagtataaaatgtcagtgttttatgtctcccagtgctgtcattcagtcttgagcacaggccgagactggttgtaaaccagtttcagacagttgctcactgttgtgttcagcgctagtgtctcttgagatgccgtgaattacctgtcttgatgagaagaaattttgcagacagaaaatagtatctctacccctgtaagctatttttgcttcagtccacagttatcatggcaaaattcacttctgcctctatcatagcagttcactttactcctgagtgttttctgtaggtcatataaaacgtaggtgatggatgaattctgtctcttagttgtacctgaagaggaaaaagctaaattacaagtgtttcattatcataattttctgaaatggactgcaatgctcaatatttctgttcatcataattattagaaatgtttatgagtgggctcaacataattttagcaaacagctttgaggtttttacaataaatgcctagaagatattgtttaggggttagtatggggttccagaaacagagaactatatttactgtggattgtaacttttctacatatgaattctggctgattagaaacacaataagatcagagcaataaagtagaaactgaataagtttcacagaatattctagaaatggacattaaattggaagcaacagaataataatgaccttcctgaccacaaaacatgcgtctttgttagtgttcccagagctctgcagcacggtttaatttcacagtgttgtgccattggcatagtggttttgattagaaatgctacatctgtttgagaagatgtgccctcccttcttctttcaaacaaaataataattcttctcgtactattttttaaggcacatatgccttcttaaatgtaatttttaatgcatttagctgcatttgcagtgcatttagctggcgtgtactatcaagagtgttgataatctaacacagtaaagtgttgactgggagaaaaaactttaagttaccctttcttttatatattttttgtttttctttttcttttttaaaaatttgcacatcagtaaaaagagagagtggatcttatcttgatatactccattttcagtctagaactttcatttgatttgtgctagctgcttgtgccagctatgctggtgctggatgacgccagtgctgtgtgttgtctaatttgtgggcagaatattgcctcttgttgtttggaaaggtcatgagtgtgtgtgcatttgtcacttgagggcttcaagttcatatcagactaaattttagtgcctttttgttgatgagctcaattggctttcactactgcagcatgctataaagtagtaaggaaggcaattttttgaattaataaagtgatggattatctaattaaaagttgaagtgagatgtgggcagtgtaactgactgcatcactagatggtcccagtgactgatcagattggcctgggttccattaaagggaaatacgctattaaatatttaatactgagagcgagcagacgcaccaggactgctaacctccaggcacctggtgcacatacctatgtgtttggtgataactgctggaagagacactgcagtgtgcttagaacaactgctggaagtctttgttgttgggattttccttctctactggttttaggtaaagtgggcaaacagccaagatacttaactacacagtgatcctggcattctaattacaagcctgtgatacactcatgatttatgttttttctttactataatagattgagtccccaagtagattcaagagacatttattctcaaagatgtgcatcagcccagcaaggaaagtgatgtttgttggacacttgggctttgaagccaaaacaaatcatcgcttgaattttaatgatgctatttatttatcattttcttcattttcagccatttggctaatatttctcttcatttatgtgtaaataacctatgatgggtgtatgtttatcatggttaaagaccagatgccttctaacttctgaaggtgggaaggataattagtgaggtctttgtcagcatttttatttatacctgtgctgcccaatgttagttgcttgtcttagtttaggtctgctgttttggtgaaatgtatcgagtgccagtttgctaaacctttaacttatttgtctgaatggctaacttgccattaattcagataaagatgagcttttgaagatggcagtaaaatgttgtgaagttaggagaggttacagtcactgctttgccccttttatttagtggcaaaatccttcttggggtaccatgccactatgagaccgtgaccaggaatcaggaattgcacttaatatgaatccctaacaactttcttgtttgttagccaaataaactactacagaaaaattcagtatcttctgttttgtgggtattattttaataaatattttaaaacagtaaattcagtctgtaagtatacactagacagaaagccatctttaatatcatggcacaatttatgaagtttagtaaattagctgtcaagtcagtgctgtagtgagactgctatctcaggaaatgaagacttgctggattaattactccagggcttgggaagcctttctgtaagacacatatacatgactgtcattgcagatgaattcatgcatgtggtctgtgtctctgaggcaggttttcaaaaaatcaactgttttaaactgacaaaaaattcaaatttttcatcaatgtcatttatttgtttatccaacctcttgagtctactgtgccagattcccaaatactgggattacaggtgtgttccaccacacccagtcatccagtattttaaaatctgaaaaccagaatggcaaaatggtcttcattaacatacgtattacctcacaaagtatcaactcgattttgctatcataggcaaaagcctgggccatgtaatagggaaggacatagctgtgcactaatgaagtgttgtgtgtgaacacagaatatcgggttccatatattttgacatatcctggaatggtcttctgttagtttccccagtaacctttaaaaataaatgagcatggtttttccttgcaggctgtattagagcagatggcgggccagatttggcctgtgggcctttatgtggcaatctatgaatcttctttgtaagccagaagatactctgctcatactaggaaacagaatgcactatcagaaaagtctttaattaaaaaaaggtaggaaaagttttacatttcctaacaagctactagctctatttgtttttgtttccagttctatttacaagcacatatatacaaatagttgctttgcttttattttttttaactctaagataatttaattcaataatttaaaatttttaattcaataatactgtaaagagagatgcagatgtgtttctaaagacagaaagttgtcaaatagagaaaatacatattttttaaaagattttatttatttattatgtatacaacattctgcttccatggatatctgcacaccagaagagggcaccagatctcataacggatggttgtgagccaccatgtggttgctgggaattgaactcaggacctctggaagagcaatcggtactcttaaccactgagccatctctccagctcgagaaaatacatacttattaatgtcttgtgtatttaaaatatattctgtttttacacacacacacacacacacacacacacacacacatttggagacagggtctcagcacatggccttggctggcttagaacttgctatgtagactgcctggaactcacagagttacactttttctctgccttctaaagcatgcaccaccatgtccatgttattttaaaaattatcttcattattatgaaaaataattatcagacagtggggagggaggctgaatgagagatggggagtcttacatgtgccatcttgaggatgtcaggatcaggacagcttggctggttgtcttctactgtgggttctggggagtgaactcaagtcatagggttgtgtgctaacagttttgtaggcagagtcatctccccaaccccatttattttgtgtttataagacaaggttttgcagcatagctcaggctgtcttggaacttttggttctcttgcctcaagttgctttctcccatttgctaggattattggtgtatatccccagttttggatgtgtttatatttttttttaaagctaaaggtgttatatttttttatttttcctgatgcaaagcataaaaataaaattttaagttaatattagaaatatcttggttgcatatcttaggctgaaaatttgtgtgtgcttgtgagtgtgtgtgtgtgtgctgtgtgtcggggccaggtattgatgatgaattgcttcctctatgttgtctctaccttagtctttagaaatagggtttctcaatcatcccagattggtctagtgaggcaggccacactgggagtcggcttgcccctatactgggttacagtcccccgtataccaggccttcatatgggagttggggaatctgaactctggtcctcatatttttatagcatgtgcttttacccactgacacatctctcagcccccaggttcaaaactttttgtttggttctttagatttttttttttatttttattattgctcccagactgcattgtgatttgtgtatttctattacagttgagaagagcttttcctgaaaggaaaagaagaaatgtattttagaggtgtgatgttaataatgacaaagattgtcataaattgctccattgcattttataataagcaagagcagagttatatttttgagattagaaatcatttgttgccctttgatgtggaaaataatgtgatttgatacattaacaaaataaagaggtaactttgtgatggcttttctaaaccagatttaaaatatatatatatgtcctgatcaaggtcaaaagctatctcccttaccatctacaagaagaggttcaaaaatatattttcattaaaacatttatgttcagtgctcagtgttgcatgcttaaagggacatatcgcagtaagtactggtctccgaagcatgctgaggaaaagccagaaggccagaccattctcaaccacactggctgaaagtcttaaaattagatgttccaaggatgaattagactgtcctggtataacctgaagctgcctgtccctgggaggtttcattgcagatcagagtggggatgctgggatgggttgtctcagtatgcaggagggccggatgataagtggtgtcccacggggtctgtgaagctgtcatattgatggggtgcgtcttggcggccacaggctttttgcttacctcgtcttctcaagttttgcttctcactaaggtttcagctcaaagcttcactcagatccaccactagggctggcttttttgttttgtaaaatcagtcaccagtggtgttttctgctgcagactttggtggctgtatttcttaagctgtgtgcttttctttcctggattgtcaaataggttgtgaacctcaagaaaacgtatttgtactttcccctttcctttgtgcagcatggcagagtaagataatattcagctgatagatcaaagaaattatccacctcttggctccctctctctcccgcgatgcatcaggtgctgtgcagaaagctgagttcattgtgttctgttctgagactctttttgtttcttgatgctgacagttcaggacctaccctcagaattaaagggcaaacgtgctggggcgcaaacgtgtttagttcatgtcacatcagctccacatcagtcttcgtttcgtgtattgaaaatcatctctgtaaagccaggagatgaagaatgcttggtgtaatagtattattcctaccaacatcttcacactagatcagcttgtttccacactgaagagtttcaactgcagatattctctctgtctgtgcttgaatgaccgtgacttgctaaagcagctgtgcactctcacttcagatgtctttattataaacagaatttatgaattacgattagcattgtgtggaatcgtttgtaggtccaatgctttggcccattttataccaggaagccaatgggtattcgatagtggtgtgggctgtgtgtttctctcagtagatggaggaggattggcctcaggattcccagcgccgccctctgcagttctatttttagtgttttctaacagcacacagtactccctgtctcctccaccagccttctgggttactgtggatgttatgccctttgcaggtgaggaaatgtgtaagtgtggggatcagagctctagcctggcttctcatctcagcgttcctgctccccttactcctccacactgcactctgtgttatgtgagacctgtggcagggctctaattgtgaacggatataaaccacaggagcgaaatccagagcgacaaatgtaagaatatttgctagtatttctctttctggcaggaaaagaccattatgggcaaagcagtagattttaaaatgccctctctcgctgtttctatgcaagggatctgttgtgttcccccttccctttcctccaggcaccccaaaattggggtggtttggaagatgctgcatttttctttttgagtggcttgcatcgctgctgcaaagttcatatgaaaatcaaggtggctgaagtagaatttgcatggggataaggctgctttttgatatctgaattctacagcctggacatactatgtattaaaacatgaattattcaagagcaccccagcatgagtctgtattgtttccaggccattattggacatagtttctctgtaagtctgtagatagatattttgtacattaaaacattttataattttatcaactctgtattcgatccagaagaaaatcctctttggtagttatgcttttccctccttttatgagtatttacttgacctgagcatttacgtttattaatagcacaagaagaacattttacaatatcatttttgaacacatgctttccaaggaaataaaagcaggaacactaatacattagactagtccagacgatgatatgtgccatttcatgttttgattggcatttggctataattttgatgcttatagaaaagcttagcaagttcttcactgttcaggcagctgtctccttaggttctcttgtgttaacatgaggaattggaacaccctgtgtgcactttcctgccttgccctctcctgtctgaaaggttcaggcattatgcaggcctggccctgttacctggcagaatccactcaggcagtaccctggtcagccaagcgttccatgggaactaagtctgcacgcaggtgcagaggaccccttcaaaagacagacccctgcccatttacgctctgtctgctctcctctctctcctctctctgtctctgcctctctatggtgaccgccatggcggtcagccattaaccatgttcctcttctctcttagtctctttactctgccgggcctataataaacagcttaatatgtctcatcttgcgcgcctctttttctttatatctaatttaaacaaaaagctaacactgtccttgtggtaggagtgcagcagagtttactcggggcctgtggtactggtgacctgggggtcttgttttctctcaggcttgaccagttcttcatctttctcgtgcagagggggagttattacgctgtgttactttagtgcccatcagtctcctgtaagtcatactgttgcctttcttgccctccaccctcccaagtttccatacagagctttgcaccgcaaatgttcagatcttactttgtaatgttcaacttcaagaagtcctccggctgtttgctgtggcacagcctgctgtggaacaatctttcttgtccaatacaaatatatttcattgattaatatagagctgactttcggatagttaggcaggagtttgcgggcagaggaatgctgagaagaaggggtggagtctgaggagtctggagccagaagcagaagaagtaacatgcgaagttcatagatgacctaacggagccttgggtggcacacacattaatataaacgggttaatttaagttagacgagctacttagcaagcctaagctatcagctgaggatttataactaataataagtctctgtgtggctatttgagagtggctggcggacagaagagtccacctacatggcctgcccctgactagttcaccgtttcactttactagctatcttttgctgatttgcctctcaccgttggctgcgaggggttcacaattgcagctttacccaccttcctgtgccttgagaaaacgccaggcttcagttctaggctttgtattcttttttcctaagttctaatcctgtattttgtatttaatgaaaattttcacctggataacttgtctttacttgagattcatggtccccagtttataagcacctcttccccgagaagtactctcctgcaggcattccttcctttcccctggcagtcttggtatggaatcatgactgctgtctctctgtctctgtctctcccccctctctcattttgctttactttggctactgcccttgttaggagtgttgttctcttacccaaatggtgcttcatttttatacgctgatggtagagagaaaaacggatacccaaacccaaatctgatcatataacacccccataaaatgtctatcaagagggctggagtgatagctcaacatgtgagggtgcttgctgccctaatcatcccaaaggctgctccccaatactcttgtaccttgtagagagagtcaaggaattgctgcaattcacccactgtgtgctctaactccttcacacgttagcttttcaagagactgaagcttttcgctatcccgtaaaggcatccatgcattaatggtggcaggaaacatgggtgacttgaatgttctctggaagagggagttgtctttggcaggctgaagcagctttggaactagcttgtaaagatgatcctggatatgagggcacaaaaagcagaggccttctaagccagtcacaaatcaacaatggtctctctctctctctctctctctctctctctctctctctctctctctctctctctgtgtgtgtgtgtgtgtattctgacgtgggtctatttcagctctgagtaatattaatcctctgtagtaactgagtggatttttctgctttgtcagtgctgttggattttataattagataattacaagtatgtgatcagatttcagaaatccacttatgcttgctaatggttgctaaggcttggagggattttggtttgtttaattgaatcacttcattaagaggtggggctgcccaggtcaatgggatcccgtcttgttgaatgaaagcctatctagcatttatgtagaaaaatggtgatcctacaaagatattcttgtgctaaaaatattccattcataccagtaagattagaatatttgttacttcctcccacccaagtctgcccaagactcacacaaaatcttttacattttgtggacacgaggtgttgtgctcctatagttaaaaatattctcttagtttattagagtagaatattttcttcatgacaagaaatgctgagacttgatgattttgttgtttaaaagttcttttgaaaatttctagatgttttcaattatagaacacagtggggttcgcagtgagtgggatggtttgacgggtcatatatttactaacagccgccagcattgcctttgacagttcccttaaaactccatcctttccttcattccttcctttgttaacataccaccttccattctgcctggcaactccctctctacacctcaaactgttgtcaccattattgtaatctgccggacaatacacagtacactcccatgtgttgagtatgacaaacgacggaaaacggatggtggtggccacagtccctcaaggcacttctgtttagttgtctgtatatttatttcttttagttctccttcaagataggatggaagcttaattttaactctccttttcccgttaagtgatgcaggaagagataatgggaatctgctgaatgatgtatttagctggttctctctaacctctcaaatacctaagaatcccactccgtagtttcctatttcttcatttatttgatatacataagaaataagaagagcttatggatgacaaaccaaactgcttttcctcatccttgttatcaccaacacacaatactaaatattgtagtagtaacataggaaacaggggaaagagtctcgaccctccaagacaagaagcttcttaccacgctgccaaactccaaacagcaatatcgtatgatgctgaataggaagaatggttcatatttacaatttaagatatcacaaaggcagcccaggattttctgttcaatacactgaacagaaaacagctgttaagcaaagacagactaaatgacttccgtgtgagagaactcgttgcagcgtctccatatagtcagaagtttcctgttgcttccaaatagagaaaggattgcaatgtcaacatttaaggaagaagaacttcaaatgagcactcaagctagcatccacccagaaacaaagaaatgtacttatgcacctaggattttgaaaggcaattacactaacatattctaagaagcattccatgcctgtgcagttagccgagcatcaagggagtttctaaaatcaatatgtatttttttttaactgtttgaaagcatttaatgttagcaatgaaatattctcacaggctttgtcgttcacagaacaggctaaaactctagcaaaatgatgcatgctagcatattttaacacagatgggaaagcagaaggataagatatgtgcagacaaaaatataggagcaggcacttgggtttgtattactctgctctagtcaaacaagattacagcaaactgtccagggcaacccaaaaggcaagagcagaaaagaagttgtagtgagacgctcagtggcagctgcctgcctgagatgagtggagcgtgaacacaaggactcttacatcatccgtacaccaggtagtaaggtcaggattctgtctcacttcttacactcagtgtcttctgtggccaatctaaaatcctacagaagtaactgggccccaaaaggacgtttagatgaaagcaacaagactcagcaatagagatttcccacataagtgtttcctggaacacaagtggggttttgaaaagacgatgtcatttgctgagacatggttttttccagtgctctcttttatgaatggcaatttggcacaagatgtctcacccaacttttgaaatgtaaagacaaatgaatcccaaatatgtggtagtaaccgttaaataaaggactggacactgcaaaagaaaaacaaacaaacaaacaaacatcagaaagtgcagctgctttccagacaccaggcacaacatctcgagattcatgtttttaaaacaggaagatcaacttactagaacaaatctttctgggcaacaagattcatcatggatcctgttgagctcatactttccctagtctgcacagtctgatctattgtttgtagaaagtaaagatttgtaagcaaaattttcaagtaatatatgctatgcatgactatgtttaattttgtgtttattattttgctatataacccattaatagtaattataataacccatcagttccaacgagtaagatctgctctttattgtctctttagttctgttttcttttcagttggtttgtgataacgcaatatatttgtgcagtataatgtgagttttcattatatacgtatagaatgtaatgatccaaccaatctgttgattcttcagaatgatggagtcaggctacaaggatggacaaggaggaagggtgctcagacaatgtgaatagaaggcaccactgtatgtctgcagccgccattgactggtgatggaccggagccttcagctactcgctctgtgacaaacaagcctgctcaggttgccagcatgtaattgatggagcagacatagaaagaagtgcccatgttgatcttttacacacttaccctgaagactgccattgcccccccccctccttgccccccatcctgacatggtagggcagagtccaaaaacacgaggagaaggagtagctgaggtgttctggaagtctcagtgtctggcatctgtgaaaaaagtggttcagaaagaagatagccaggttaggattgctaactaggtaaattccgcattgaactgcatacttagaaactcacagcagtggttcgatttttcccatggatcacagttaggagactgtctttgtttcagtttgagacaagttcacacttagccccaggctgccatcctacctcagcttcctgaatattgggattacaggtatgatccattatacctagttatttttttttaatttacattcttaggaccccctcccccacacgcatattaacactcaaattaattctgctatgatcggcttgagaggtcagctttgaatgtagctagaatgttttggagtatttcaggaggctccatggtgtcacggtgatttaggacttggcagacttaagaccatctgtaatggaagtgtccagaacgaggaagaaagaaggtcaaagtgatccctatctgcctaattttatagtattctaccttaaaagcttctgagaactctgatttgggaacttactgcattgtagttagacatgcaagcttgtgtttgtacacgatttacaacctcttaggtaccacaggaaggcaatactaaagtgattatctgtggaaaaactggatggcctatcttcatggttcaccttgctgtttaaatattacagtttaggatatagatatagatatagatataggatataggatatagaacatggcttatttaattcatgaccattaaaatcagaaaaatgtgttcacaaacactttcgaattttgtttttaatttaaggaacacaactagttatagttaaagtttgaagatatgtttggttgaatatttttgtctcaactctgatggttgtaggcctttgattctgattggctgttagttcagtagcgtcatgtactgtgtcaccacagagagtgttcatcaaatacacggtgtgaatatctacctacccaacaggatggaaagtctcatgagacagaagtagtgagaactgcaggctgggtcctggttatcggctaccaggacatgtcaggagagggttaactatcctactcaagtgctaagacagaaatcgtaggacaagctaactgtagatgcttttgcaagaaaggaaccttgaagtgtttgtttcatttatattagactttctaattaaggaatctgtggaaattaaaaaactccagtttctaaatatggctctggaagcacacatgttaatttcaaattataatcttcaaatggccttatttcccttatcatgtctctctaatattaattttaacatatttatgaggaagtgtcccttatctgcatgttattaaatggaagcagtcagacttcaacattaacattttttctgctgtagtaaagctgtgaaattagcatgcccttatattttatgttaaaaggacgatttgtgttactgtgaagataacaaggatacccttatcctgatccctgtgccgaaatgaggtcctctacaattctcttaagtcattgagtgtcacattgtcccattagcaattgcgtatcttgtaaggttttagaaccacctgtgacgttgactctgtaatccttgtttcacctactaaagactgtttctccaagtgggagctccacactggactctttgaaagatcccgacctctctcacacaaggttgaggcagtttcagggaaagtaagttcttctgtcaataataggtattattcccatgaagtcatccacactccccatcttacataaatgtcttagaattcttcctgcatttccgtgcctcttgtaggggagcaaggtgaagcacctctgtgctagtactttcctgggagctgcctaaggctactcttattctgcagctcagcagtgatgggggaagtccttctgtgtatatgtttgttttattggttgatagacaaagcactgttggccaatagggaataagaaatttcagcctgtgtggttgcacatgtttaaatctcagcccttgggaggtggaggcaagtggatctctatgtttcaagacagcctggtctacattgttgattctaggccacagtctcacctacacaatgctggattctaagtgccatcagcacatgtcccatcatatcatacagcattcttgagatcatgcagacaaagaagtatgactttgatttcatgtccaaataagttagaatacagagagtggacctatttctactcaacagagtttatcaaggacacagaattcaccttcaggcattctgtatcttgtcctctaacaacccctccctgccttctattcagagcctgggctatacagtgaggccctatcccaatcctccccaccccctgaaaaaatcaacaaggatggaatttcaacatctttttttgtggtacacacaaacaaaactataattcagaaagattcatcacagggctattcctcttcagataaaaatggattaatttgtagcccttggctttaaagctgtgggatcgttgaaaaaaacattaaattcaagcccagtgtcacagatttctatagagatcaggcaacacaggggtcttttgcaggtgctggccctgtgaggctggtgttgatggctgggttgcagggaacatgcccaactcctgcaggctgggcgggcacatgctatgggcagccattcagctgagatgagatgataaaacctttgtgatgtattttcttcctactattttttcctgcttaggaaatgtattttcttatgttttttgttgctggccatttactattatatacttctttggctgtgtgcacatgaaaacctttcaaatttattattttgtagtgtgctttgtagttattttttaaaattaaattgtattttctccttcactctggctgcctccatagaaatttcttcaagtttattatatttgggtgttttatatagatatttactgctacatttattttatgtagaaaatcttttgaatgtgttttatattttctttgttaccatgatattagtttctttccttagttgctttatttatttatttaccaggatctgaaatataggactattagacacatgaatgttagttttgtgtacagtaaaattattatgttttgttctctgctaaatactttaatttttattaaaggttttgattttatattttatttttaagttagtataattctatatgagcacattctaaacttgttatttccaattgattttcattttgtagtatgtaagccttaatgattaattttttccctcccaagaaatccataactttcaaatcacttagaatgtgtattattagaaagcagttttataaattgcctgctttgtttctttgtatcttaaaaatgtaccttatgttccgttgtatattctgtaccagcaaatataatatttttgttatcagaatttcattctaagggcaacagaacatacactttactgggaagcctgtaggaatagtggtgactgtgtattgaggacataaccatcggctatgctgtgttttaacagtggcctttgttacgataaatctttctgccaaaagccgcctgagcctcaccgctgtgtgtgagctttttgccagccacccgcccgagttaggcccaaatgaatacacagaaatttgtattaggttcaaagctgcttggccaatgactaggattctcatctgttagctcagtcctaattatcataaatctatatattttataagacttatcttatcggatgccttattggcgtccctccttgccggtggatcacatcgtgctactggagaagcaaggggaaaaggggacccttcctgtttctccttcgcttaaatatgagtctccttgctatgtcatttcctgcctggatcaccacttctctactacatttcccagaatcctctttgactcctagtcctgtttaacttgctgtctcattggccaaacagtattttatttaacaatcaataagataaacatacacagaagtacttcccccatcatctcttttctgtctaaaataaaaggataacttatcttttataataactgaagaaaactataaccataactatctgtcttcaactctatcaaagaccacagaaggataatatataaactctagaactgacagagacatctgctacctggacagtcacccacagttcctctgtaacgttggggcatccatctttagcccataggccacagtgtgtctggcacacttctccatttcaacaggaacccttcagtactgtcttgttttgtaagttcagcagtcattttcttgtgggttctgtatgtccagtttatacagcaacaaacagtccaggcaagagcagtttcttgccaaaatggctaatcttgccatgttgaaagcaaactccataatgagtttcttcgatgcccatcctcctttctgacgtaattggtgtgccaggagcagttgcgtcttactgccaagaaaaaccctaaacaatttaaatgccatatttctgtaggtctttgaaaggtttgaagaattcctatccatctcaaatacatctctgtaaatctagaaaacctaactaacctaattataagttctgactattataggtaaaagatctgtataaacacaatacctaaacaagaggagacatatacatatcacaaaattgaccttaaagttgtataaataaatgaaaatctataccaatgcaaagtattcattcctatatcctattcccttttttttctttaaaaaaatgactatgctcattatcatttataaccaaccccatttaaatgaaaacaaacatttgtaaacaatatttgggaatatgggtgtcattcattctaaactgcttcctgctgattgggggccatgttcatataccatgggaatcgtgataaaacatagaaacctgaccaagttgtttttgtagtctgtaaggctgtatcgtctcagcttcagggggtcttgctcaatcaaaccatattagtctggaaggaatccacagctttttattttctgtggaaatacaagcaaaacctttgtttctaagtagcctgtctttaaacttaaattttgaagttagagcatttttaaaatgtataagttggattaatttagcagtatttataatcaaatgtattttagcagcagtaagtctttcctcggcaatcaaacaatttaaagacaacaatatggcatatagtatccagattctctgtctattttccatccttagtggcttttttattactttactttttccccagacaggatttctctgtggaaatcctcctgcctctgcttccttcagtaaatcctaccggtgttggccaccacaactggctactctatttcctcctgttattttttctctcacaagcctacatatatttttaaacatagtgtaaacctttagaggtttttctttatctggaaatgtctttatcatctcgggagtgctgagtccaaaccccagaagcgctgggacggcgcaagcatatggaagctgctccgatgcctctcagcggcccagcccgacagggcaggctgtggcagcaggtttccctctttctctgggaaccttggggcatgggttcatcccgctcactgacaccattcgtaacaggccttgtttgcttttctgctttcatactatgtttcttagaagactcatgtatttagaaaacttttgttgagtccccataaatttgtgggtttgaatttacttccttagtcattgaagaagcatttatggagcctcagggtcctgtcccatagatttgtgtatatggcccgaaaactattgtcatttctctctttgtcttaatgcttgttaatgttttcagagtctaggcttaactttttgttgtaagagtcggcgttgtgattttactgggtcacttttcacatggtagctatttacttggccaaaaggaaatcctcttgccctgtgagcagggcagtctgctgcccaggttcttattattgccattgtaacatagtcacctgctctctatgaggttcattccatctggtggacacttgctgtgaaaactcaccccgcccttcactgatgaattctggttccatctttccttccttcccgttaccaacttacttaaactggataaagcatgaagagagtttattggctgtgaaaaatatctgtatttcacatggccaatccgtgggtttctgacaacgtcatcagtatctggtggactctacttccatggattgcttcagttcttagccgacggcctccttgtggtgggaaaacagaggaccaatctgggtctaaatccaacaggaaggagggaaattatttgtttgtttgtttatttgagcatagttccccaaattagctatgacatgggttgggtcaggctgactttcttgaattaagctgtaaccaatgggaaaccgttgatttgtttggctcatctaggagctcaatgccaaaggctcacagacagacactgagagtgacactgtgaagacctgccacctagtgtgtgtccccaccatccttgttcaccaactatccccttctcaagtttctctgatactgaccatctgtaagtatatacatatactactttactttggattacaaccacttatttattcatgtatttgccaggcatttacttggtgccaatgatgttgcaggcactgtgcaaaagaacgtgaaaacaaagataaaaaggatgtctgatgcccttagggagttaacaatccactatgtataatttagtctttgaacggacgataaagctaagatgttagacttaacactgtgctcctttgggcatgccacaataatttcccacaaaacagactggtgatattctgcagtttgtgcgtgtatcttattaaaacacaaggttttattactttatacttgccacatcatacatcttacttattgaccatatttgttcaagctgagacctcagagcattcccagtctatattgttctccccgatccccataggaagtattctttctttgtcaggttcctagggagcctgggaattctctgttggcctcaaactcagagacctgcttgcttctgcctcctaggtgctgggattaaaggtgtgaactggtctcattttaatatttgccacacagtcattgctagtatttatcatcaggagaggacttccgtttctggaaatcaactatccttaggaaggctagaactctgatagaaagacagtgagctcctctcacagtctggtcttttgtttctttgcaatcaagcccagcctttggtcctgaggtcactgtaattggtaatgaataggtaaactgatgttcttcgaggtggagggtaagaaccatcattgggcattggctggtgccggcaccacagcctacatatattgtatttaaaatgttcacaacggttcatggtaagttttgtcattatccttatatcataagaggcgaatggaggctttagacagaggagtgaacctgccagaatcacttggcagacccgggtcctgacctgttgggtcactgatctctcagtccaaaccagctcttagtccagtaatctcagaactattaaaaaaaaaaagcccaaattcataacatgctacatccaacacctccagaaaaagctgtatagtatcctcatctggcaatattttattagaatttgttaatttcctccccttttcccagttagacaagtttatgtaatttccttaatatggtctgtgataagagcggaccgtagataagccaccacatttccatcagcatcttagagtatctaaggacctcatcctttagtgcacacagctttgtttagaccccatgcaggcttgaacattttccactgtgttagaacatatcataatctctttgaagcatttgttcaggcctgtaatcccagctactcaggaagctgactcagaggattataaattcaaggcctgtctaggatacacagtatttaaggccagatcctgtctcaaaataagatgccatatagcttgatgggtagagtattttccccagaatgcttgaggctccagtttcaatcctgtaacaaaacaaaacaaaacaaaacaaaacaaaacaaaacaaaatctttttatgtagcacagaaaagtaaataaaagcccagactagaaattcaagttctacagaaaccccattctttacaggtcaccactgctaagaactaggtctccatctatgtcagtgtttattatatacacctgaatattcaccgcatttaaatttctttcagtagttgtgaattcattagtaatgaatgctaacatttagtcgaccctcttaggttacaaccaccagtgtatttacataaaaagtattattaaatcccaaatttgttttttttaaaacatgggataaacaaatagaaatgaaatcgtggaagcagattttgcatttatcatgtgtgttattttctaaaatagaatgtattggtttagactctaccagaattgtgtgagatcagcatattctctctctctctctctctctctctctctctctctctctctctctctttccccctcttcctcctctttctctccccttctcctttctcctcgtctctgtctctgtctctggtttttagagacagggtttctttgtgtaacagtcctggctatcctggaacttagtttgtagactacgttggcctgagaactcagtggtattctcctgcctctgcctccctagtgttgggattaaaggtgtgcaccaccatgcatgcagagagcatactcttaagacggaaacaccattattcttttaattctttctatgcttatatattatataagccatgtctctttataattttttgtttaatcatctgtttctgctggtttgtacatttacatgataaaaccatgagatttttaactctctctctctctacctctgaaaaattggaagccctgtcaattataaacagacctaaacattgtctctggctcttgattgtagacatgtttctttgtctttagtgatggagtgtaatataagggatattacatattctgattgttgagtcattgtcattgtacagtgctgacatttttgccttgccttctgaaaaccattgaatctcaaacattttcatctggtggaagtatatcttagactttatcaggggaaaatgtccatcttgttgctattacctagcggatgaatgcttggagtgaatgtggcagccctgcctgtcctgtgaattgtatggaaggctcaagacagcccttatgctactcaaagctctttttcacattcagagaatttgaatttaaaccagcccataagctatttaacacagtttttaagcttttctgtcatggacagaaattaatattcaacatttagaattgttttcaatttgttgcctttgtaatccttgatagaatacggctatggtttagtgcctttcctcttgcctgatgcaataatcgctaattagtattatttttttctctaagtaagtgtgttcttcctattatggaagttcttttctatttcaggcttgtctttgctaggactgtctggaacttatgggttgaactagataatgaaaagcttatgttgtttgttgtctttcctgaagagggtgcatcaagagaggaaaagagtgggtttactgttgcactccttcagaattaaagataatgggacagtcattatatggaaaacatagttgtagttataattcctagataatattggcacttaaatccaagatgtcccattagcagaaaacagaaactgtgactgtctgtctctaaaacatggatgttattgtcctgtgaaacaaggatgaatgcagataacatatatgactcaaatagaaatcttgggaaaattttaatttaattaaaaggccatgctattctaggtagacacacatctgactgatgccatggatttgtggtgttcacacatcagaaaaaaaatcaacaaattgctgacttttgatgcattacagtgaaggaatcagcttcccttttggcagccataacggccgaacaagtgtttctataaccttgccctagacactagaaagtcagattcctgtctcgtgacagggaaccaatcagaagttagctggtgacgctatgctttatagctctgggtgtgctttatggacaagcgcacagcaatgacgtagagagcatagcaaccaccctgggagggcctatgggccataacaaccagttgaccaatcaagccctccaagcctggagtcacaccaatcctgagcctgtgcgtacccctagacactccccttacgctgccctataaagatctatgcgcagcggcttcaaaccatcttttctagccatccgccatggcgggtgggtgaaagacccgagctaacatggggttagctcgttaaattacaataaagcttcgtgcagtttgcagcaagttctcgaatctgcctggtgattggggtgacctcgaacgtggcctgggaccccgaatacttgactttttgggggtctaacaacagaacattttttagtgatttattttcattttatgtgcattggtgttttgcatgtctgtgtgagggtgttgggtcccctagaactgaagttacagacagttatgagctgccatgtggttcctgggaattgaatctgggctctctggaagatcagccagtgctcttaaccactgagccatctctccagtcccgaaatttcagaatattcttaactttgctaagacctgtaggtaagctattaggatctttttttttaaaaaaaaacccagccattgctgcccctggccacaagcaagacaaggtcctgccctgagtatgatggcggctgttggttctttcgcccaggaagggtcatgtgagtgctacagtcacattcatttgttgacgattcttgatattacctaccgcctccattttgcactctggcttttttaggctacttttcatacctcctactgtgcctaattgagagcacagttccaccttggatgctgagtacaaagatcctttttgtctgctctctttgacctctctgggctacaaacagctaacgttgtgttatctagtcttttcccatgactggatgctgttgccacagactcacactccactgatctaaagacaatgcttctttgtcccctgtcctctatcttgcattgttttctttcataatgtcatcgtgtggagataccactcttaccaattattacctatctcacatcccctcctgagctacgacccagtgttcctaactggttatgcaccctagctcaccatctagattaagcagcttggacggccgcctcagacttccccttagatccccttagatatttgtttcccctactgtatttactcctgtctaattccagcaacccagaaacctttgaatatgccagcatttcaacaaatcctattgttttagaactacctctaaagaatgtgttcctctactggatagatttgctatttaattacttaatatttcatccaaattaaatgaaattgaaaatatttaattgtataacatttgctataatcttaactattattattagagtttttgagacagggtttctctttatagccctggctgtcttggaacttgctctgcagaccaggctgtccccaaactcacagagatctgcctgcctctgactcctgagtgctgggattaaaggcgtgtgccaccactgctcagcaatcttagctattattaacaatgcctttaattctcttcagtgggatgagtgacagtttctctattgaaaaatgggaagattgaccttgtttacagaatataccattatatgtagctttaggactgtattttagaaaaaattcataaaaatatttacaaatacatatgtgtgtgtaaaatatgaatatgtaaaaagtaaataatttgcacatgtctacactggctgtattggttacggcaggtgtggctcagtttcttctgtcgttttttgctggtattttttcttacaaagccattctttatcattgtcgttatgagagttatagtttttatccacattaattttctggatgttcagcattcctctaccgttgtgtaaagtcattgcaaataaaaaagaaatgatttgcttacagctcgagttgttaggggaagtgctaacatctttggatagttgtagaaacaagttgagaggagagcagaacccatatactctcacaggcatctctgaagctttgacagttgcgtggaaattgcccccatctgcctgagcagccttcgtgtccagactttaaaatggccctcttgattttcaacatgtccttctgatattttctagatccatataaaaggttcagtaaagcatatgtgtcctatagtgtgcacatatatacaccaaaacaaaaaaacaccataatcaaactgtggaggtttcctgaagcacttagtcttcatagttcacccttctttggagattgattttattctccttttgatgaattctgacttttttgttacatggctgccacctcagctgtttaacgatttactttacttgttcagagaattgagttttctggatcttacagctatagcttgtgtcgaggtcaaaatcttttaattttattgatggagctggtattataaccagagggtctcatgctgtgtatttaaatcctgtcatagtgcttaaaaactctcatatcttggtttcccgtccagtaaatatttttttattaaattccttggatatatctagtttacttttctttgggagaaatattacagaataacaccagcctcatgataataaatagattgttgccatggtaacctggcacttttttaatattagaattttcttgttgaagcaaaatttatgacattgggagccttttcctgatggtgaaagcttcatgctgtctcttagagttggaattatgctggatccaaacataactgctctgatttaggaagcaaacatttcatttacaccctttgctaatcagtgggtccattactatgttaggagacccatattttcttagctgcaggcattgagttttccatagttaaacaccagtgagagctgtaagagagtcaaggtaaagggaaatcccatctctgtctctggcatcaccgagcttgttctcttactcactgcagtaggtcccagaatattgcttgggttccctgagactggttttcaaagttgtaagtaggaacatcaatctctgccttatggacttgttttattaacttattgctttttatttacagaaagcacaacagtagtaatatacagcatattgaatttatgtatcatctcacttaacctccataagtaactgtcttacttttgttagcagttgctgtgacaaagtataccaacaaaagcaatggagaggacaaagggtctattgtagttcacagttccagcttacagctcatcattagggagtcaaggtggcatgaaggtacagaggctaccacagcagaaacaaagtatagaggcatccatagacagaccagagaggatgatcacagatgtgtccatagtcaaaccagagaggaccattatagaggtgtccatagtcagagtagagaggacggatgcatacatgcttctgcttagctccatctctccatgcttacacaggtcaagatatcttgctcagggaatggtactgtccacagctaagttagggtctcaacatcatttaatttaatctggcatttccccacagacatacccataggctaaccttatctagacagtccttcattgagcctgtctttttaggggattccagagtgtgtcaagttgacaattaaaactaaccatatcaatcacaatgagagaaaggcacagcattttcagtttgcttatgaaggtgtttatggagtgtggaggtttgaaagaaaatggcccacaaagggagtggcactattaggaggtgtggctttgttggagtaggtgtggttttgttggaggaagtgtgttgctgtgggggtgggctgtgaggtctcttctcaagcttcactcagtgtgacagtcagtcgacttcctgtttcctctgagtcaaaatgtagaactctcagccccagcaccacctctgcctgctgctgccatactccccaccatgatgacaacagactgaacctctggaactgtgagcaagtccctcctcaattaaatgttttctttataagagttgccatggtcgtggtgtctcttcacagcaatagtaaaccctaactaagacatgcaggatagctaaactaatttgtccacctcacagttactcactcaacttctgggtgatggactttcctggggcaaagatctatgcataaaattaataattgaaaacttaaaacagcattgatgctagctggagctgttacagtagaagtgaaaagaaccatggcacaaacctttgggaggctggtgagatgtctctgtgactggtgtggttaaagtgcttgcaagtataggcatgactttaggttcccagagcccatgtaatgcaggatgggtgtggttttccacctttaattccacctagaaggtggggtcaggagatccccagagcaagatgactagtgggattaatcaaatctatgagctttgggtttcattgagagactctgcctcaatgtataaagtagaactatggaggatgacttctaacattagctttgggcttttgtgttcatgcccacccatgacttgcacatgaacccacactgtgcccatacatgtgcagacattcaccatacatgcacaatgccccctacacacatagacaaagaaaagcattggaacaggaatgcttaagcaaagctgagaaagagaagatagcaaagatgattgctgtataccgagagataacagcacagcaaagctacaagaagttcagcggtgcaactgctacagaggtcactaaagatgaggactgccagctgttaactgagctggttgtaaggaatcatgtgttgatctctgctacagcaccttagtgtgatgaatgctggacctttgtgaggaagttgactgggaatggatgaaaagcctaaagtgttagttggaaggtcaatgtcgagttcttgcattctcttagtgtctcttaaagagcctgagtagttgaactaataaagataaaatgttaacaatgagtggtcgaaagggttattagtgatgaagtgagggttctgagaagctgacagtagggggtttggttgtgagtcccaggatagacactttcctggggatagctgtgggctgtttttgtatggacagttccgtgtgtgtgctgttccccacgtgggctggccactttcctggagtagtctcaatgggaggacggccacttagctccatgtatgcattatgtcgcttagagtccacagtcctctagtttttttttttttttcttatcttttgatagtgccttaagtcactttcataaagtgcatacccctccctcttactgtaaagcagcctccagaaatctcaggttcaccgagtggctggcgaatctgcagaatacacacaacacggaaatgaaattggggaagcacatgatttgttgaccaaaccgtgtaacgcacacagccgagggttacctccacagtcctcggataaggcgttctctaggggaggagggggtaatgttagcgataagtggtgttcaccagcctagggcttcgtaatatcttctttgtgaggttgtaatgaccatcattatgtaagagtaccatgcatgcttcacttttgattttaaaaatagtacaggctcccaaagcaacttggagagttgtagtttacagtgcatcatcaaaggaagccaggaccggagctcaaaggaacctggccagcgacctggaggaggctatctactgtcttgctctccatggctcgctcagcttcctttcttatagtgcgcaggaccacctgcccggggggcggacctactcacagtgggctgggctctcccaggtcagtcatcaatcaaggggatgtcctgcagacttgcccactaaattgaggttccttcttccctgatgaccccagctttttcaagttgacaaaaactagccagcacaagtggttttattttgttttgatttgtagtgggattgaaccacagtcctctggcatattaagcattctccctgccactaagttacactcccagccccatacagtccttttgtagtacagacatgataacgagatgggcctctatccatctgatctgaggcggttttgagattggtgtttgggatcccccatggtattatctgcagagtttcccaactcaagcatgtgtttccaatcttctgtgttttcttttgtggtgccagggattaaacccttgtgatctgtacaagctaggaaagcactccacccctgatttatgcatccagccaagaatctttttttcctttcatttaaaaaatttaattaatcattttctttttattatttatgcttttgttttcaatacatcctgaccacagttttccctccctccactcctcctagccaccctcatctcccctctcccccagatctactcctcctccatttcttttcagaaaagaccaaccatccaagggatatccaccaaatgtggcataacaagatacaatgagacttgatataaaccctcatatcaacgctgggtgagtcaacccagtaggaggaaaagggtaccaagtgcaggcgaaagggtcagacaccccctgccagtcccatagaaacaccgagctaacaaccatagcatatatgcagaggacctagctcagacctaggctccttgactgctgcttcaatctctgtgagcctgatgagccctacttagttggttctgtggactgtgttctcctagtgtcctccatccctctgccaggcatgaatcataacacttattcccagctaagattattttctcaggagtggttatgtgtgttcctgccaccatcccactttccctgcctgatgtctgaatcatttactcagttccttgtgttgctttctgctgcaggttcctgttttaacatgacccctctgcccttgagtgctctcaagtaatggtctgccagtacctgctcctggcactttaagggaaggtggtaatatgtcatgctttctactgggtcagtgcttttgtgcagcatgtgtctacagaaattatattgggctgtgctgagtgattggaatgttggagtgggcttttattagcaatatatttgcccatatagtgatcatatcttttttaatatgtgacagttatagtaagtttaagatacagacatattggattggttgtgggaggtagaagtgcctcctttactacctgcattcgtgataatcaaattcatttttccccaagaccaatatttctttctttccattgtaattaggttcctcattctacaagttaattatgattataaatattgaatacttggcatgttttctcaagtatgaaaataaaagcttatacttaatgtgtgaactcagctgcacataggtccaggcatatggctgctcgtgttgtctaagtcattggggtcttttgtcattgctgtgacaaatgtgctcaaagggctcccagagtcaattctttttctgttcttcataaataaaagaaatatatttttaagttcatgaatttataattgaaggcattactctattgttcccttatttgaaggtctacgtataatctcagtttgcttagttgcctatggtctctaaacatttgggctagcatttttggctagaagccagcagcaaatgatattttccatgcaactcttagctcctctctcccttcttccagcctgatgtacaaaatgtactcataagacatcacatttgaattgcaaatttgtatgtggatattatcttacaagtagccgggaaagcaaccaagagggaacaattctctaatttgttagcaagttgtatacataatttgtaactgatgttcaagttgaccatgcggtcattgatgttttgtagatttgtaaataatggcatcattcagtctttcctttctctttattaaccaacacccacatgtttttcttttacttaaggcaaaacttgttttctagtcaaaggtgatgcaatcaatatctgcagttccagccctcctgagaccaaggcaggagtttgagggcagcctgggctatgcagcccaagtgtgtctttttaatccagcttccacaagcaaacaacaaagcttccttagttgtatcgccacaaactagcaaatggccttatgtttttaagtagaggatggtacgtatcattttatgttgtggaaaactggcctgttataaaagatgcatataatgctaggggatactcattaattatgagttcttttcagaagtttgtagctgttggtcaaggtatcagtctggtaaattccaaggagtctctgtctaattttttgtttgcttcagaataccgatagatcccgtcccttcaagctggggaaggagaaagagattttgtgtatgggggggttggtgatgaatgtttatattctttatattcttttactctgtcataggaggtctaggtgcttttattcgtcttgccttgctacttgctgtttataattggtagtagtaaaactaaaatccagacattggtttaaaggaagtggcatgaaggattgcccagtgactgtgaccctaacagggtgctgatttgtccaacattctcatgtgcggaagccaagcctctctttgacagcccagttttgtgtttggataagttaatgtttttgcaggtggattccattcacaaggaacctttctgtggaggaactctagggagtcagtaatgtaagaatgtcccctccgtagccttgactagagaactctgagctcttcctttagcttcggaaatgggaacagaagcaaaaacagaaacagaaacacagagttcttatgtaagtttttcttttatagtgacaccagaaaattcaggtagctgtgtttaaatccatttatttagtttttgagacatggatttgccatgtggttctgtccattctgcaactcattcattatttagtatgtagccagactggcctcgaactacccagcctaacattattttattgttttgggattgtatctagggactcatgtatgctaggtgaaaatgctctaccactggggcattacagctccacttttaataatttttaatgagtgaaaagactgttagcaacacaagaaaagctacagaagatgcttttttgttgggaaacttttatactctcctgaggttatctccattttcatcataatgtagtcacttcactatgctggtttgtcttctatagccctgtgtgtgtgtgtgtgtgtgtgtgtgtgtgtgtgtgtgtgtgtgtgtgtgtgtgtgcgcgcgcgcgcgcgcgcgggcacgtgcgtgtgtgtacacccacatgtgttcatgtatgtgtggaggcccaaatgttgatgtcaagtgtttttccttggtcattctccacttcatttattgaggcagagtctctcactgaacctggagatcactaattctggctggcctagctagccattgtccccagggactccatgtctgcctaagtgctgagattatggaggctgccaagccttcctaagcatttttgtgggttctgcagacccatattctggtcttcagcttctgtgataagtgctttaccttccccagcaatattttcaaatattcctgtacaggagagaggacctcactctgtcaccaagcggctgggttcttttaggtctgtgtacttcatggtgctgtcatgatggccacattctgttcttcatagacccacacagttttaatgatgagtaagtgagtgactctcactatctaccttggtagcttggggatttccctgcattctggtagatgtatctatatggtccctaggaatggactcgtctttctaactactggcctggcattgtcttggatttctgctgtggactctgtaagtgaatccacagccactttcagtgaatcctggccactagcaatatgacagccataggttttctatttttctttctttaagaaaaaacaaacaaaaaaaatacaagccaacaaaaacaacgaaataacaatacatgagacagacagagacacacacaaattgagaccaaatcaaaatgagtgcatttaaaattattatttatcttataatttggggaaaatattcccccaagatctgcagctacttttttttttttttttgacaaagtttctttgtgtagcccttgtagacttagaactcacaatgtagaccaggctgacctcaaactcagagctcattctgcctctgcctcctgcataatgggattaaaagtgtgagccactacacctggctacagctatagttttaatggaggttagtggaaaaactcttctaatttgaatttgaagtctggaagtttgattattacacatttagtaggcagcagtaatcaacaaaagagaggtttcctgaattaggtgaatattacagagattaacaaaaacagtgtctcagtattcacatttttattgattaattgttaccacagacaaatttctaaaagagattttttgcccagctatccttggagttgatagacaaaaggactaattttctgagattttgagtacatcaaaatcagtcatgactctcatacttagaagctggcattgtgtgaaaacttgggcaaatagtttgtatggcaaattttaagtaaaataaatttgaaatctaagacaatggaaaaatactttcttttaagagatattgacaggggtagtttggcaatttgtgagtattagattttttttttaagtgctagcatgtgccagaagcaagattttattattatcctttattaagctgtgtgtgggcgagaaggagaagggaggggtgagaaagagcgagccagggagagaacacgcattgcttttgagtgaggatcctcagagactggaaatttatctcagtgttggtgacatgctgagtctacctgaatgaccctgtgactcttgaagcactcggggtggtgctgactttaggaatcccgagcaaggtgctttctttgttctgcgtctgctgtgtctgcaacatatgccagaagcagaagtgctggggcgcctgcctgttgggaaatctgaacctaacaccaaagtagctgatcctcagcatgtgacagtgacagtcccgtgcacgcgctcctgtccttgatgcaggcactgaggaggggctcacagtcgacactgaacgcacttgcctaagaattcatttctgaggaattcatggagtatttttttctccgtgtcggttttttgtttgtttgtttgtttgttttttaatttatcgtttctcctccttggtttgctcttttgactactttggatgtgctaagcttaaacatttgattttgtggaattgagtgcattttgttgttttcaaatcagctatggaagctggactattctgatgtgaaggttgcccttggggaagaaggcatgatgacacgtttaccacagctgagacccagttagacagcgggaggctccacgtcccttgtgtgcagagtcaaggtgaagaattggcaggagcgggcagggcaggacattgtggtgacaatggcggcgtgtcatacactaatgctgagatcactgtggtgacgatggcggtgtgtcatacactaatgctgaggacattgtggtgacaatggcggcgtgtcatacactaatgctgaggacattgtggtgacaatggcggcgtgtcatacagtaatgctgaggacattgtggtgacaatggtggtgtgtcatacagtaatgctgaggacgttgtggtgacaatggtggcgtgtcatacagtaatgctgaggacattgtggtgacaatggcagtgtgtcatacactaatgctgagatcactgtggtgacaatggtggcgtgtcatacagtaatgctgaggacattgtggtgacaatggcggcatgtcatacagtaatgctgaggacattgtggtgacaatggcggcgtgtcatacactaatgctgaggacattgtggtgacaatggcggcgtgtcatacactaatgctgaggacattgtggtgacaatggtggcgtgtcatacactaatgttgaggacattgtggtgacaatggtggtgtgtcatacactaatgctgaggacattgtggtgacaatggtggcgtgtcatacactaatgctgagatcactgtggtgacaatggtggcgtgtcatacagtaatgctgaggacattgtggtgacaatggtggcgtgtcatacactaatgctgagatcactgtggtgacaatggtggcatgtcatacagtaatgctgaggacattgtggtgacaatggcggcgtgtcatacactaatgctgaggacattgtggtgacaatggtggtgtgtcatacactaatgctgagatcactgtggtgacaatggtggcgtgtcatacagtaatgctgaggacattgtggtgacaatggtggcgtgtcatacagtaatgctgaggacattgtggtgacaatggcggcgtgtcatacactaatgctgaggacattgtggtgacaatggtggcgtgtcatacactaatgctgagatcactgtggtgacaatggtggcgtgtcatacactaatgctgagatcactgtggtgacaatggtggcgtgtcatacagtaatgctgaggacactgtggtgatctcccaagggttggaatcacaggtatgtgccaccaccagtgacttaatttcatactttcttcaggagtgagtttgcagtgaggtgtggtacagatgagtccaacagagaaagtattgacagtttggagaatctttgctcattctttcttttgggtccagaaatcagtgttcattttctttagatagttaacaatggacacaaaccagattgatttatgatatttttcttagtagcatttgttgattgtttagcaattttagttgtgaatacagtttttaccatttttctcataacatatgttggaacagacgtctcgtctgctagaagcagtattaaaaatgcttatataacaataacggtgatacagacatcatctgcagccgatcaaagacctcagccctgttgttgatttatcttcatctgtctgaagttctgagaaaaaaaaaagatgctgaaaataaaacaaggtaagaaaaaagacaaaacaaaactaaaccacatgtagctcctccccccctccgagatttgggatgtcggcattgtgttgtgttcagtctccattgcttggtctgcaaagctggatctacttgctctgtattgtggggaaatatcttttaggcattgcacaaacacagcagaattcacacactgcttccccctccctttctattagcacacaatgggctgacgtttggacaccccccccactcccccccacctccccccacccccagtccattgatgctagagcccttttgctgtttgacattcaaatgttgagtgggagttacgtctctagagcagtggttctcagctttcctaatgctgtgaccctctaatacagttcctcatgctgtgctgacccctaaccataaagtttttttcattgctactctatacttgtaattttactgctgttatgaattgtaatgaaaattattgatatgcgacccccatgaaagggccattggacccccaagtgggtcacaaaccacaggttgagaacctgttctagagcattctgttgggctgtggcatgaggcctctcctcctgttgtaggaacaaaggagcacctgtgttcaggagtcaaaaccttttctttttataatgattaagcccaggatgtgaacagtgagtattaagttgcaacattagtctttgtaggcaggatttttttttttctttttgagtatttactacttagcaggctatgctctagttttgggggatacaaaggtaacaatggcataattcctccccttcaaggtactcccctttcatagagagaagcccttgtttgaaataaaatcatgtggtgtgctgtcatcagtttataatcacaatttttacatccatgcaactagcatgagcatagaaggcgctacccaggggagcaaatgcagcagtacgtggaaaggtccttgctagtatctgacacgtaggaggctgtcaaaaggagccagccacttttactcctaacgacaggctgcagaaaaactaaagaaaaaaaagtaccgtggattggttcagggctgaagctcaggtatcctaagtccggtaaggcctcttgtgcccttgtggcattccacccatcctttgccttaaattgattctgaaatgtgctttcttgtgacttgtagacactgtgaacacctccctctaggacaggtgctgtgcttctaaacatcttttcttcatctgatctctcagaaacccatgaatttgtgtagaatgagcaaaatcctagggtaaattggtagctatgaaaatattcctgtggaatggcagtgtgactttactcatgaggtcactgtaagtaacagatccaaagacccgaggaacacaccctcctcttgacactgctctactagctatccttccctgaagtctttgttttgatgtggcagcttcctcaaatgcaggctcacctgtggtgtgtggttaggtattgtagtgcctaataaatgtgcaaacagtggagacaaggccaccaggggtcagtttcataccagtttaagcagtgagcatagtagtttttacttctttgtaaagtacagggagaatagaaaagtcacacacacacacacacacacacacacacacacacacacacacacacacacttttaaactccaatctacacccgaagatcattaaaaaaaaagtagagagatgtcttcagccaatcttcctgactgatgaagacagtgggagaagataaacgacagcatgcaaaggtttagctcttgattctgacgtggtagaccggtacttccagctacacttacttttcacagtttgtattgctgtatgctgtaagaatatggaaatgtgatatgagtttatttgaccttagctactaggtatgctttgtagactactttatgtccctttcccctctagctggttgcaaagatgaactgccactagctatagtttgcatgtgaaaggtcactatctcatagtttatatatgagactggacacgaaacgattacttctggctactaatcttcaagagaaatagcctccagctactatatatattcccttgttatctttgtgggtttgcatggccttttctttgcaacctagatgtatgggcttggcatttgtaaggctaggatctcaaatactaaaaattaagtgtgtgctggactcaggaattatccatgtagttacttgctggtgataagctctttcctcagataacattgctttgatgccttggtgtgcttcccccagacccccagctccttactgttgctgcatactgtttagggggccctttatatactgaacactgcatccatccaaaggtgaacccaaatatctggggaaaaattgcatctgcactatccccaaacatttctcttgacagtccctaacaatgcagcagtgactgacatcacatttatacactatctgctatcataagtaatctagaaatgatttaaagtggggagggaatgagcagagatcacatgtaggcaccgtgcatccatggagtctgttatctgtgagaggttctgaaccaattcctgtgactggtcacctaaagatctttctgtgatatcagtgacagcttgtgatggttttgttgggcatcttagctccatttttccctcttcttccctcttcctactctaagctttgaatctatcccggtcctcccatgtgcttgctcaattcctgagctataccttcaaccttggtctgcatttcatggtaataaatgatgtcaagcattttatatagaccctttggtcatttgtgtgtcttttttcatgaaaccttgcaatccctttaaggtagtccaaactgggtggattatttcagctgtttacattcacaaaatagcaccatctttgctatgtaattgctcacatattaatttaatgaacatacattaagcagccaccagatactaattgctttgtacactttggctggtatacataccttcataacaatcctatgagatgaatgatacaattacgtatacccctttatggatggaaaatcaagactttgagacacggagtaacatcccagtgggatcaagctaatgaagaatgaagttagtatttaaacttggctgtctgacttcatgtggatgtcctaacatagggtgaggtaaatcacatccgtgttagagcagctgcagagatgagtggctgcagtggggatgtcctggtctgcacagtccgtttgctgattcctgttctggaccactgttctttgtcctcactggatctattgcctggacttgaggagagagagagaccctgtgaacacagtatctccaagtcctcagaagccccttccaacaacagcaaacttttctcaaaataagtaaatagcaactaaaatcttccaacaaaaacagagagagaaaacgtagatggcagttgcatctacctggtgttttagcttcagaaggacgtgaaactttctgtgaatctggggctgtaaagacagattgcacacacatatttgtagggaggcactgtagccccacctcctaggagcccctacaggtgtgcctggccatgcctgtgagggtgtggtcaggggaggtcgaggatgacgctgaggcagttcttaaggggccgcagacatgtggagggccccttctctctggcctccctagcttgctgcctctggcttttgtttggctggtgtttatgtgaataaaaatatcttcgtcacgttatacatattcttatcccagtgtagatggagtttctttcctgcctggtcccacatctgtttagacccaaataaatatacagaggcttatattaactacaagtttggccaatggctcagattcttactggctagctctctcttaattactaacccatttttattcatctaagtatttccacatggtcttgtcttagtggacaatggtctagcatgttactcttttagtggctacgtggcatctctctggagacttctctcagcctcccttcaccaaaattctctttgtctggtagacctgcccatactctctccctggctactggccaatcagtgttttattcatcaaccaataacagaaacatatatacagaagaacatcccccatcatcacttttctgtctaaataaaaaggaaggttttaactttagcatagtaaagttatatataacaaaacagttatatagcaataactatatttaacagtgtttagtttattaacatttgacaaaatttaaagaaaatattttatcatctgtctttgtgactctaaagttttatgtgtaacttatcttttatcataactgaggaaaaccataacaataactatctgtctccaactccatcaaagacctcagaaggataatatataaactctagaattgacagagacatctcgtggcctggatagtctacccaaagttcttctgtaatgctggggcatacatctttagcctacgggtctagagtgtctggcagacttctcatcgaaacaggcaattttatactgtctgcctgtgttgacagtttatcagtcatttttctgtggcctgtataatgtctgtcagactcttccatgaagcaggaacccttaaggactctcccatcttgttttgcaaattcagcattcagtttcctgtgggtcctgtatgtccaatttttacagtatacagtcaaacagtccagtcaagagcagtttcttgcccaaagggctagtcttgccatgttgagggcaaactccataacgagtttcttcaatacccatcttcttctctgtcataattggtgttgcctggagcagttgtgtctcgtcatgaaaacccctaataaaccatttaaaatgccatattctgaggtctttgaaaggttttgaaggatgcctatccatttgaagatatatctttccatatctagaaaacctaatataagttttgactattatagatgactatctatgatttgtatttaattatacattacattttaaatgagctgcataaacacaatacctaaacaagagtagaaatatacatataacaaaattgaccttaaatctgtatcagtaaaccaaaatccatagcaatgtattcatttctatatcaccccagtgttctcagtagtcctctgtgcctttggcttagcatttctggggagtcatttgaaaaactgaagcctgctatataaagagacaaaggaacagattgagacattagttttcagtgctctctgccgaatcggttgactttcaccctgcctgtgtccgtgatgaggcattttatttcatagggtttacaggccactcaataaaatttagatgcatttggactgattgaagggactatgtgcttgaattagtgaaaaatcttgaggtatgcaatttgaaaatgccacagagttgctttcaattatgtaaaataacttagtttttttatgcatgaaacaaatgtgcacatttggagaatggagtccacaacgttcagcaacagtggcttgaagcaaagccccagaataaaacactgggttgattgtcagtgtacccacatcaggggtttttattgcacaactcattctttctataaaagtcaggcattgtgagaagtccagatgtgaagcttagaataataaagccagagaaagaatacatcagagatttgtaaaacccagttaatatggaagtaattaactgtggggatcatggtatgttctttgacaataaccttgaaacttcatttttgtgtctaatgactcatagtacccataaaaaaggaagatgaaaatatgctttcaggcaggatatgaagaagttttgggacttttctgttttctgactggcacatgcaggaatattctaatgtggtattatgagctgaagaaaagcatggcactactggaggaaggtttaactgaaaaacttttttaaacaaattaatataagtgagcaagtttccttactttacaatgtaaaattacattaaaaataaatacaacactagcatagtgaaaaatgaaatcaaaacagaaaaacacttgaaaaagtgagtgaaaccaaatggcagagttttgaaaaaaatcaacatggctgacccattgactccatcgaggatcgggaggaaggggacgacattgaggaggaatctggatcaaatgattaagttaaatgaaacttggaatgttactacttattataagtggaagagattatgaaaggatcaggtgaaccagtcctttgtcgagaaattaggtacctgcttgcagctgatgaaacccagaaccaaacaaaaatatgtactttcacgaaacatgatgaaatagaaaacttgagtagacgtatagttaatatggagatttaatctataaaagacatctcccaactaagaaaggctctaattagataacttcacagtaaaactttatcagacatttaacgaatggacacaaattaccaaaccttcccccaaaattaaagagcagggaatacttccagcacattctaggaagtcagtcatcatcacctgggtaccaaagccagacaagaccactacaggaaaaggcaactatggcccttgtgacctcatgaccatgtgacatatgtcctcaacaggatactatcaagccagattcaagagcatattagggaggattgacgttctagagaagtgggatttatccctggaatgcaacgatggttcagcctgtgaaaatcattgcaatgaaccacattaacagggtaaaggaaacaaacaaacaaacaaacaaacaaacacatgttttttgaatccaggcagaaaaagcatttgctaaaacctaacgtttcacaagctaggaataacagggaactaccttagcataggaaaagatatgagtggaaagctcacatatcataactgaatgctcaaaggctgttgacctctgtaacatgcctgttctcaccacttctgctcagcatagccctgacagtttagccacattacgtaagaccaagacttaaaaggcatctgtactggaaataaagaagcaaaatcatttctatccacaagccatataaccttctatgtagaaaatctcagtctttccatgtgaacctggcagagtttagaatagccagaattgatagactatagccaagtgagttttacatgcctacaacccaacatcctggaggcagagcaggaatgtggcaagcttgggccagtctgagctacacagcaagatccttccaccgaaaaagtgtaaaagtcatttagagaccaaaagcacagtggcatttgtcagaggctgggggttgttggggagcaggtgggagttattgtttaatgtaccaaggttcagcttttcaatactgaactataaggagggatggtattgaaggatgttctgtgttgtgagtgtttttgttaccactgaactgtatgcttataatcattgaggcagtgactttccgttatgcatattttatcacactaagacattttagaaaagatcaagttgcaacctagaaggacttttgaagcagctgtactttaaggaatgagttactttgatataaattcacagtattaagtatcatagagcatgttgtctacactattaaatatgtttaataactttctgtgagtaaagcatgtgtctggtttattaagaatcaagaggaaagggtatgataagggtttattctgcaccaaagttaatgcttatatttgtaatattaaatgattaaattaagatttatcaagggaaattcatcaatttgagttaattctttcttgaaaagacagtgcttggcattctgtagctgcgttcctaaaatgtttgtgtggatcttgggggtgagccccacaaagacatagaagactaagttccccaaagacacagaagactaagctccccaaagatacaatagattaagcccccaaagacatagaaggttaaatgtaacagagaattcagggctcatctcgtagcatggaagggagtcataaattgcacagaagtggattctcattctcacttgtccccaaatatttattttctgctcttagtttcctgacctagtatatgagaatacaatattaatatcataatatgaagaggggtaaattcattcttgtagcatggaagccactatactgagatgtttgtatttgctatcacgtgtttgttgtatctactgggtatagtgaagcatcttgaaagaatgctattctgtttgaagtcaacttaaaaacagggtcacttctgaagtaggcggccctaacccttgtcctcaaaggatgcaatgtaggttggtagtacagtggattatgtgggcttatgcatattcagaaggaatatgggcaaaagggtggttttatttattagcatcaaatatgtgattattagattttagcgatcctgatgtcatattgagttcttacagctttaaacctttttcatttttttacatataactttttaattctttcacttcacattaaccaagccataatgttaatggtgatataaattagagtccagactgctttgttaatggtggttaccgtgataaattgatacttggataaaatatgtaggaaacattgtagaaatagaagcttacaaaagcccaaagatgcctgtcagtttacaaaaccataaccaggaatcttgaatgtgtgaggcttaccctcttagggaaggtagaaggggatacatagcagaaagataaaggttctaggaatagaagaatctttaaatgatgagctggaggcagaacttgagattgactaaaagtgttctttcagttcatgaagccttgccaatcatggctcagcatccccacatgcccaaggtgcaagcgtgtgctagcagcctccatttctgagttccaatctggcatgactgccttaatgtgagacagatcccaaaccagttgtctgagggtttgtaggaatgacctggatagtggatttaatttttgtatttttgacctaaagagatttttgtaagtagagaatcgaggaggaagaattccaagtaagaattcttacatgtaaatgcgcagctctccactaagatctgtttgtacctgaaacagtttgttggtttctgagaagtactaaatttgaaaatatcctcccagagtaccatttgtatgatactgtctggatttgcttatgaactgagaataaaaaataacaacaaactccattcttttcctgttttacaattaggccaagaatatagatttgcagatgttttgtcatctgataaataaaaattcacttcattgccttcaatttatatattaacagatggctatttgctttgtgggttacctaggcagtatttatactggtagctcatctctttttggcacagctatctctgcagctttgtattcagcccatgcaaatttattttaatgctgctctatttcatctttaatcaggcaggcaaaaattctaataaaaagtttcaaagtgaatattttatgacctagtactaaatatatactctataactttggggagagccatttgtcaggttcataaaatgacatattgcctcccataaataaaattactctgggagatttaatgaaagagaattaagatgctgtagaataggagagaaaaatattattttttgagtttgtactttcatatggaattatacttctttttgtgttatcaactgaaaaacacctttctcttttttatttctgtttcaaagactttaacattatgtttcccttaaattattagtagaatttgatgttgcagtaatcatttgttttacagacattagccagtctatactagatacattatggcatgcaagtaatttataacaatgtacatagagatacaaagaaaaatatttagaagaaacttgttgttagtttggcaacacagagggcagaacttttggttctcttagtgtggttccaaggttgcatttcaactggccaattaggatgagcatgtagttgtcttatggaaaaaaataaaaagtgatagaaagggagaacatgtctttcccagtcgagctgccttcatgtcctggaagcaaaaattgctcaatcaattagtgaccataacctttgacatatggtgaagacaaaatttactgtatgactagctactcctcatactggctcaccttgcccagccctgttttgttgatggtctatgggagacctggcctttcctgaacagaaaggagtcgattggagggtgggaactaaggagggttgggggagggcctgggagggtaggatggaggggaaattgcagcagagatgttaaaaaaggaaaaagaatggattataacagaactggagagggagtcaccactggtctctcttgaaatcaggtttttagcagatagaagtgagaagctgagtagtgtcttgaaccaatgatgcaattttaggagtaagataagtaagatatgttgaccaggaactgcagtgtgatctcatgttactggaggagttttcaagaggagttggctacttcctgtttaaagtgcagagaagccgcgtggttatcttactggtcataaccctggcacacaacttcatctaaaagtcactttctcccaattcaaaatcagcagttagaaatggatttttaaagtctaaccataaaatttgttctatatgcaccatagagttgggacaacttagtaatgaagttcatgtaatggtatgttataaatgatattaaagggtaccagttagcgcctcagcctcaggagtttaagaatgtcttaaagacagagatgcatgtggtccagacagcttgccatttctacagagtgattataaaccatcacagtatattgcagagtccattggatttaaaaggctcttcttgggaagacatggtttatttatatttctctatagaatttaccccccccccacacacacaattataattctgtgtgttgaattcagggcctttcccaggctaggcaagtactctaccattgagttgtatcaccagctaaagacgttgtactggaattttgttcagatgatagaataaatatattgccaaaatacagaaaatggccatatttcatcaactttgagatacacaattttctttttaaatacaaatttgaaattttgatttttgtatgtttgtgtctgtgcatgggtgtgtgcacatgtaagtgcaggtgcctgtgggggtccagcagaggtcctggtagttgtgagctgcctaacatatgtgcggggtgtctttgctctcttaagcacagacccatctttcttgccccaggtgatgagtttttatattttattttacctgatgtatgttttacgtcagggctatgttacagtttttattttttcgagacagcgtttctctgtggctttggaggctgtcctggaactcgctcggtagaccaggctggccttgaactcacagagatccacctgcctctgcctcccgagtgctgggattaaaggcgtgcgccaccagcgcccggctccatgttacagtttaatgagcagtgttttttagcagagctgatggaacctgctgtgtgctttacctagtggtgtttgcagagggccagtgagcatccagagacgaaataaagacaggcactgtgctggagtcatagactttggtcacatttatagatctgattcacactgaattctttgtgtcacttgctcagctgtgacattatggcattttctgttttatttcaggcccaggtttctagttggattattttcatactcttctaacccttacttcctctctgacttcatctttggaaatacttaagtctcctaaaaattaatggacatcttactagtcttctcttcaaaaatctctctaaattatgcgtgtattgtgccatcttgtggtaccatgtgccacagccatgacacgatgtgtgctggaagtacattctgtccaactgctggatttgaactagagtgttccccacctctccaaactcatctcctagttttctacggtagagatgtcgattcatctcagcaggccaggaggtgtgtctgtctccttgcaaaacgcttgtcacattgctgacatttaataaacatgaatttcttttatctcagggtccttatacacaaaatggattttactcataaggtacacaattggtattttggtgtatgattatttatatggttgcaagcaaatgttttaaacaccttcactttgaagcattgtgtctctaaggctgctgctcccccttccttcccatccattggaacacatcaggcctttcacaagctatttctaattgaattaagttttcattaattagaaattaataactaattacatttgctctgcttcagccatgtacctgcctgcatgtccccaaagcatggcagctcattggtgtgaggaagacacctgatgtcaactgtggcctccacatgtgtacaccccaccccagcatgtgtacatatacaggaacttgtatacataagaatgaagtaagcttcacaggttaatatacaatagactaaaacgcatttgtcttctcagcatgaattctaagcctgtgtttccttttacctatatgcaggttataaagttaaaagagttattgtgttctgcctagacactatggtcttttggctagaactcagaaattaaaagcttgatttgttagtttgtatccaaggaattagcttgacttgaaatagtttggtagtaaatgattaattatgtgtcactaatataattatttaaagtggtttctgtctttcacttgttgcatttaatatatgaattagttgtcaataaaattcctttttatggagactaaaaaaacgttcaaccttgcttttgggttggatcatacatttggaaggagttggtattttcctttgagaatgaaaaaataaagttttaaatggtagtatagaaccatatagaaagaattcacttttctaactccatcgcttgtggatgatactaagacattctgaaggttagagaacagacaagggtgtcaattcctagagacctagaatccagagttcctgagttcaattcccagcaaccacatggtgctcacaaccatctgtaatgagatctggtgccctcttctggtgtgcaggcatacatgcagacaaaacactatatacatattaaaaataaatctttttcataaaatacaaataaataaatcctagaaagatacttaaagggatataaacctggacccaaacattcattgaggttttgttgagagtgtaccatggttcagctatgtgctgaatatcagaggttaatatgtcatagtggacagacaaatggactcatagcatagatacgcagagcagccggcagaatcaggaagtccatagaaatatctgtatctgaaaggaataatggtctgtctgaacagggtaattaactagtttctctgtttcttcatttgaagcaaaaaaaaaatattgtaagatcctactcagaaggattgagttaaaatatggcaatatgcccagaactgtgtctggcacatattaatagataattaataattgttagttcaacagtgaaaaaaataacacatccctggtccctaacagcattagcctttaaaattggactgcttatgcactgtggaattgtgctctggctcacatatgcctgtgtttgctttgaaatcctgtgtaatccccagtggtaatccaagaacaacacacacacacacacacacacacacacacacacacacacacacacacacacacacacaccctccctcctctacacacctcctcatccacacccacattttaattattgtcttgccctgtggaaaaatgtctgtataaagttgtttagcacaggaaccattcttatacttagatgcccactataatcacagaagtactggaaaagctttcaaaggcagcagagttagaggaaaggctgtgtacagaaatgcatccatcagtgctgaattccaacagtttttttttttttttctattccacttgtacatagtgggatgatgtttgtttggcggtgggagtgggggatggacatggcaggtgaccatccagttgttgagctacagccctcgcccaggagtatgattcctagagatttattctaacagtaatggagttgagtgatgccagaggaatgagctgtacacaggacacacactgtcattgtgccatttgcataggacacctggtgggtttttatttttatttttgctgttgttgttgattatttttatttttgctgttgttgttgagacaggcttttactgtatagtccaggctgcctagacaatgtggtcttttggcctcgaacttccagagatctgcctgcttctgcctccctggtgctgggattaaaggcaggtgacaccagccctggctgagtcctgattgtttaaatgaccccttcctgtttggaagagtgtaagtaagcgctgcctctttctagacaatggtaaacggatccaaattgttttcgtctctgttgctctattactcatactgcatattaaagaagcagggtgttatcacttgtgacggtcactgatttatggtgggtcaggctagcctcaagcttctgctctttctgcctcagcttccccagtgctgggattacaggatgtgctaccatacccagataattatgtgtttagactttcttatcatcaggtaaacaattaaaattgccattttatacataattgtgtatattcatagtttatgttggtgacatttctgtatttattgaatgtcatcctttgaaaattattatgtccttactataaggaagtgtacttattttctgacataaattatcaaaccttaaaattcgatgactataaagtagcattaaaacagcagcaagattcattaaatttaaattgcttttaaagtacattttcaaccttcttagatataatcttgaattacattagaaatgtcaaataacataaaattcaaagcacttctctagttccatattgaccctacagagtattaaatattaaacattaatttatttcatgctactgggaggtcacaatgattcagtgtgtagttaaaaaagatccagttacttgatggtttgtacattctgtaacaactgtgtttatttaccactgattaacagggtttgttctggtggtacatatttcaatattagtaaaccatgtgtgaaaatacttattttcaatttgacatctgaaattggcaacttacagaatttaaaaaaattctatcccttttggaaaacatatcttctttttaaatgaaggaaataatgcaatcacgacaagcattagacagaggttgagtcatacctggtaagtttaagaaaggtagttaaatcttgctataaattaatctggaatgaaaaaacagccttatagaagtggagtgagttcttgaacaggatgagaacctttagacttcatgtatttctttttttattttagagacagtgaggttatatatttatgtttatgtttgtatatttctttatatcattattatctgtatgagatagtgtacgttggtttaaacatgtaaatgagtttagtgatagtccctatttaacagtgttccttcaattgtgcctggcagttagcaaacaccatctgccaccttgtgttagtgtatgtggtgtggggatcagtctgtgcctggagacagaagtaaaacaggcagactatcacagtctctgaaatacagttccagggtatgggctagtggtccaggccttgttgtgctagatgtgtgcccaatcagaaaatgacacccatggaaggtgctttttatttgtcatttacttgtaagtacacaaagacagacactcttatttgaagttgttcagctactttatcagaaaaaagatattctccattgtgtcatgttcatcttgtctcaacaactctagcctaacagcagtcctccctagcctaacagcactcctcacttccagcccttatatcctcttaccaacaggcctgtgttgattctatccgttgatttcatgtatgttcatatctgaatcaaactctcaaatcatacatagggtttaatgatgaaaaccatgttttgagtctcaatgtattcattctgtattttaattttaattaattagttaatgacagggtctttgtagctcaggctggtctcaaactcagttccctcagtgccttgagtgctaggattacaggcatgaaccacctctcctgctgtgtgtttatctttataagagatggttgattggctttaagttttcattttaattcatcaacccattaaagctaataactttggaacgtggctgccctttaaatatttgatttaggagagttgtagtgacaatccaacacctcatctttcaaagttatacaccaaactaactttttcctagttttgtttgagagaattctagatgcatcagcagtgtcttaggaaatggagttgagtttacccgatgggtggtgtcctcgcttgtggtaatgtccctgtgattgtgggctgtgtctgccatatttgttgcactttataaatgtaatgccttctgtcttcctgtgaacttctctttagggtccagtgaagatttgctgtttgaaatcaagttttctctgaggatgtgcaaacttacacatcttcacacctggctcacgtgggaattgtctgtgccgagtgtttcagcctccagtgcactaagaatcatattctgggttcatttgttttctttcggttgatacaatatgacaactaaatttgtcaagtggaagttgaagatgtgagtgttggactatgaaaatgaagtttttgaggagccacagtcatcacagagtgagaaaaattggatagtgttccaagtgtgtgcaagacaacagcttagaattagcgccagggcggaggaaggcatgaacatgcagaagcctctttgaattttagatttcatcataagacagttctgatggtatgtaacaggagaagaagaggaaaaaggaatgcatttgaatttattctgcaagttcttagaattaggaatgaactcaggaatcttattgtgctacagataacatgaaaactgccttgggaaaatgctcacagcagacaagagacatgatttaatgtaaaaaggacaagttcacctctctctctctctctctctctctctctctctctctctctctctctctctctctctctgtgtgtgtgtgtgtgtgtgtgtgtgtgtgagagagagagagagagagagagagagagagagagagagagagagagagagaagtagcttgtaagatttaagaaacagttaatgaagtaaaatgctgtacagtaggcaatattttaactggttagtaaaacaaatttgggaaatacctaagtgttaagcactcacattcatgtacttagtttttgttttttttggagaaagaggagctccattttgtttatggctacagttttgtcatcctgtggcctcattattaaatgcaatttaaaatttttttttttttttgagccaaggttttactctgtagccttggctgtcctggaactttctctgtggaccaggctggccttgtatgcacagagatccacctgcctctgcctctgcctcctgagtgctgggatcaagggcatgtgccaccactgcctgcctaaatgaaatttttaatggagcctattttgggaaacattttgtcccagaaattaaaacataaaataccccaacaacaactatgtagggttttatatcaggcaatttccttgaattaaaacttagaatatttgatagtttgggggtttattgtgtcttttctgtgttttgtatacagaattggataatactgacactgtcactattttattgctttctagtctctgtttcttcttcatggttttatttggactttgaaaagcaactcaaagcagcagaagtcagagatgcactgttcaccaggggtgtgccaggcaggctcatacctgggccagacaggctcacactcgggctacacctgggctagacaagttcacacgtgggctttttttggagtctggccacaagatctccttttatagaagtccagggcaggagccctttgtgaagcccagagaagatttcggtcagacctgcttgcataccaaacacagccgaacactggaagaagtgatatacatttggttttgttgcagtatcatgcagaaaaggtatctttttgcgacactagacatacaccaagattgaaccgaagcttccagaattactttgtttaaaaaaaaaaaaaaatcatcatctctatttggaactctttcaagttagcaataaaagcaaatttgagatgatatagaatgatttaaaatctagatatcaggccgggcgttggtgtcgctcgcctttaatcccagcactcgggaggcagaggcagatggatctctgtgaattcgaggccagcctggtctccagagagagtgccaggataggctccaaagccacagagaaaccctgtctcgaaaaaaaaaaaaaaaaaaaaacaaaacaaaactctagatatcgtgtcatagctcagtatttgtttgggggggggctgccttatgtgtgatttcagtatgtactcaggaccattatggaccaaattgttaatgatcaattttcatcttttgggcgccagccctgttctggttgtcttttagtgttgtgaaacagcttgcccctaacacctcacccgtcacctctcatcccttaacccctgagtgccagcaactctcaaagcaaagcctttcccatgaactatttgagttgagatgctgcctttggagatcacagcttcatgggagggctcttggcaggggacagataagccagcacaggtgtgttctcttccctcaggaactactgacatgctgtgtctactcacgttgcctgcccagtctagacagcagctgaccaggttctgttagaatccacatgcttttagaaagatgacaaaacaacaaacaacaacaagaaaccaaaaaccataacctaaaccaaaacccacaaaaaattggagctcaccagcagaattagttttgtgtgaaggtaatagacagatagctcttagctagaagtgaaagttctactgtagtttgtttcttccagaagcatttttccaagcaaaaggtcatgcattttatcaaagaaatgaaactcgagttttaaccgttgttttgcctgtaacacatgaagtttgaaatctggaccagagatatttcttcccaggcttcacacgtactttgaaatgccatttcctacttgagactagcatagggcaatttgttatacggagcaggtaatttctcagtgtggttcctctgggctttggtgggaagtcatctaacacagctgatggctggaatagctacttgcattccgatcaggagccacctgagctactgtcaccttcaggcctaatgaggaagttgttcacaaacaccatttggtctcttaattgattgagtagtacagtgtgtgatatttgtaatttaatgtttatatgtgttcaaaaaaaaaaccatactactattttctgtggaaaaaagggttcagataaaaaaaaataatctagatgtgtttgctcccatatgagatagtataataacattgaaaagtgtaaatgttgggatctgggatcttaggcttgactttcctctaaaacgttatgaagcctttttcctgtacctcaggtatatatctttaaaatggtgatgctaaatccagcagctttgtgggattaatatacatattaaataaaatcataggttcaattttaatatccatgacagggcactcaacaggtgatagtcttcttgcatttgatataattcacttatgaatactgagcttcaagcttcactgggcatagtgtgtgtgtgtgtgtgtgtgtgtgtgtgtgtgtgtgtgtgtgtgtaaaatgcagagtgtaaccatcaatttttcaagttatacacttgatcttttgcccttaatctaatgaccctgatttggatgggagctttttctacttttaacaagagcccagactacttgaatagtttgacgagactgtccttcggaagaatgtatattttttgttccgcatagaagctcactggcatagctagagcagtttccagtcaaacaccatctcattttcatgccatagtttatatcatctgtgttcattgtgatatttaaaattccctgtgttcttttaacatcggtaagcttttacatgtgtatatgccatttggaatatctttttgatgtcagacttttaatatagataatgtttgccattattgaaggctaagtagttatgagctaaacaagtacatttgggggtaaactacatgtcatggagatgagggggtctgtttcttttcctgacttagtggtgccttctcaagtccacatctcactaattgcagtttgggtttgggtctttactgatatgttcatttggagcccgctactctgacatttgtactgtgctgtgtgccaacaccaagaggatgattttataaaaattaaatagcagcacctatttacctactctggcccccacctgtactcatgccctggcaagtgtcatatcttgatttgttgtctttttataatacatgctcttttagttattgggaaaataaatcctttgttttcaaatcacgtttctctcctgagtcagaatagttcattaatattaatgctctgagttgaatgagaattctgaaccagtgtgtaattcatcctgggcacaggtggtgacatgttcagaagaaggtgaaggtcctaagtcccttaggttattacgtggagacctcctctaattatgtagccatttggtatccgcatagctaaaaagattgctcttcaatttagtctgctccctggtatttgatgcatcgtcaagttatcctgtgattggtgaagccagcctttcatctcctttctcatttgtgtaataaattggtaaaacagtagcgtgcctgtcacctccactcttcaggtttgttctttgctagcatttgtggcttcataatctctgggttgtttgctctttttcacatgcccaaccagcggttggataaatgtgacctgaatctgccagactccatggccacagacttccttgggggcaaatctttgccctaaagtatgaatcttataactggcataatggcatgatctgacaaatagctgcccattctttttcccccctcctgtttctgtctttctctctccctccctttaccccttccttcccttgtgaaatggttccagtaatggttttattaaataggcctttggtatgtataatgttccatgtgtaaatctgttacaggctcatttacaaaaatccatgacctataaaatactttagggaagccactgtgggcaaccaggaggatatatcccagtttacatgaaaagtgtttctgaaactttgaagaggtttcaattattattattaataataatgatattgatgttgaacatacctgttccatagcatggtatggttgcaatcaatccagagtctggcatgcatggattttggatgaaaagataaattgcatttctttggaattgagatacatacttcaaccttacaaaagccactgtgtcatgaatctatcttaaattaaattcagcaaagcaaaattgtgcctctgggatggtaatggttcaccttggtaccatgaactttaacctcaaattacctcacaggcagcacatgttcctagcacatgtctccattctgtttccacacacaagaactgagaccattttctcattgtggtatgctaattaggagactttgtgttgaacattttaggaaccaatcccaactggcttcaagtcaatggaaagtagtatgccagactcagaacattgtataggagcaaaggaatttccttagtccaatttgtaggccagactcattctcctgaatgctgtttacctgagacaactttcccagtgtcttttctctgtctctctatacaatttatttattctagcatgctccgaattcctttgtttccattttatccttattttcaaactgtatcttatttgtagatgaaactagaaggaaaaaagaaaggtagaggctgtcaaattccatcaggaactttacagagtccggcttctgggtgggtttgatcagacggaatgtatgaaaatgagaaatgtcactgatgcccaaaaggcaggctgctacatggagatgaatacatggtgtttcccaatagcagaattaaaaaaaaaccctgaaacttcagcattttgaaaatcctcatggtatcatttttccatgttcagagtttttcaggaataatgggagatgcagtccatataaagcccaacttgtgatagtactggagctttctcccatatggaaaatggcagtaaaaaagatttgggtgtttgtggtaggtagcagaaaacactggaaaactccatgagagcaatagtaggagtgcttcctgtcctttctctgtggtactagaatgtacaaagcaaaaagaatgatgatagatctgcggaagactgtctctcgggctgtgtattttatgtccgctgctacacactgcatcttcccccgtcaaagtgaattagtgtggggcatgtcatgagtagcagtgaaaccattttgcctttaatcataatgccttttgaaacaccatatgaagtgattatggcatataccaccaatgctttcagttttctgttttgcatgcatcacatcctatttataaggtagcattatccaaaacaaatgggggaaatgatctggaagacgaaagctctttttcagtttcacgagcaaagcctcattccgtccagtggttggagtcagcatttcagaatttagaaattcgaatgtgaagaatagtctggagacactgttgaagcggtgatgctcaggagagcaaaaggtgcagtgggccgaatgtagatacacgtggaaccctggaagcgtcgaattaaaaggggttgcactctgtgatgctgttcccaggtgtaagaagacgataatgaaatacttcttttttagcatttgaatcaaattagcaaggactatttttaatgggattcttttcttcctttctttcttttatcagaatcaactctggccctaaaccacagggctaggcaacacttatcacgatgtgttgtatgtgtggttgtggggatgcacgtaataaatctgacttcctgctgcatgtgtgtacagagtctgaggtcgctcctggtgatgggttgaatttcaaatcattttcggattcagttggaatctgattggttggcttttgcatgcacctttaaaaaaaagtgtatatctccatggaagaaaaaaaattaaaatacatgtgtatgtattacccagttttaagaaaagtttacaaaatctaaagggcttctttatcagtacacaattgctgtcatagttttgcttgcactgttgcaggtaaaacaatgaagagacatgtacatgtgtacagaactcatgatttgcagtgactccaaaccagctataccagaacatggatgccatgatctaattgaggttaaaaaatgctcttttgtttctatatattcatttgagaaagcctagaaatgtcctcattcactaccagttctatgaatagtaaaggtttagtggcatttaaaaaaatcagttttggagctgcagatataggtcagtggttgagagctttgggtgcccttccagaggatgtgggtttggttcccagaacctacttgatggctctcaactgtaacacctgcagcaggggatccagcatccacttctaacctccatcggcattagggacacacatagtacacacacgtacatggaggcaaaacactcaagacacataaaatataatcacaaatcccaaaacttttgtaggtataaaactaaatgcaaatatttgtaaaaagaagaatgtttagagccaagagaataagaagcagtgatttgcctggcatcaaccagggggaaatgtgtcttcagagacaaaatgtctgtcttaggccactttaaaaatctttaattacatggtgtcccagaaaaattggcaatcagtctatctcaagacccagcaataccacttttgggtattcacccaaaggatatacactcacaccacacggacatttgctcagctatgttcatagcagtattatttgtaatagccagaacctggaaacaacctagatgcccttcaaccaaagaatggataaggaaaatgtgatacatttacacaatggagttctattcagtggttaaaaaaaaaatgacatcatgaaatttgcaggcaaatggacagaactagaaaaaacaaaaacaaaacatcctgagagaggtaacccagacccagaaagaaaatatggtgtttacccacttaataagtcaatattagacataaagcaaaggacaaccagcctacaggcacaaccccagagaacctagctagcaaagaggaccctaagagagacatggatccacttaggaatgggaaaagatctcctgagtaaattgggagcgtggctggggtggggtgggtggggtggggggagggtggaatgggagagcagaggagggaagaagagtggggaaaaatgtttagttcaataaaatgaattagaaaactttaattaatgactctttggtgtgtatgtatatgtgtgtatggatttgtgtgtacaccatatacatctgtgagggcgtacatgtgcacatgtctgcttgtgtgcatggaaaccagaacacagctttgggttttgctcctcagaaatgccacctactctatttttttcaggaagtgagtctcagtaaactatttggtcaccaagcaggctagcctggctggccacaagctccagggattcactgctatgcttccaggtgctagggtcacaagtgtgtgcctctgtggctggctttttctgtggctcctgtgcgttaatttcaagtctttttgcttgtatggcaagttcttttccaagtgagccatctgtccacctgtgaccatagacatcacatttgtgtgtgtgtgtgtgtgtgtgtgtgtgtgtgtgtgtgtgtgtgtaggttttacttttgttaatacagtctttaaacttaaaacgaaatagcatgcaaagtaatgtttttgatgcagcattttcttacatgtgtatcagtttactgtgttctttctcacaccctcccttacccaactgccttcacctttgatcagggcctccctctggccatctattccttctcccaagtagtgcccccacttctgctttcatgctaatgtatcttgtgctagtaccattctctggaaggatgaggagagccttcctatagttaagacctgtagagtgtaactggttcttggtgatacagggcacaagagatggggactaagtgtctgtgtccttcaataggttccattccacgaatgaaaacaaacatgtaaaccagaaaccatgactggctaggaaatgtccagcagcagacatttatcagatgccaaagtagatgacaggattgtcattttatctcacggcagagaggaaagtgacctagaagaggtcgctttggtggacatggagaacagcctggaccggcatagttttccgtggactgagatggtgatgggactgtggctggggttcttccagacattacaaggacacaataaaaactaatttctttgatgaaaacagtttttttgctatgagtgttcatgcttctgttaaaagattgcattcctacacagttggtaaagtcggggatgatgttgacttaatgtgacaacctccctggttttataggtgatgtcttttttctcaacacattaacttaatggcttctgtcatgaggtagtagcaactgaagccaaaaggggtgaccggagggtagcctagcagggtagaggagtagaggaacacagtagggagccctggtaccagtccttgttgccccttgtctcttaacttgcctttgttttcagttcctgccagtctattagctttctgttgctataaccaataccccaggcaatctgtttataaagagaaaggttgtctttgtttgagagtttggagacttcagatcataaccagttggtctcattattttagtttttttattctgtattattttgttgtgtgtacgtgtctgagtgtacaagtgggggtgaaggacagcttgggggagttggttctctccttctgtcatatggtcctagagattgaactaaggttattagaatcttgctgactggactcatctcttgtaggtcttgaacagacaatgcacgatgggaaatgtatggtgaggcaaaactgctcaccccatggccgctaaggagcaaagagaggaagaggaagggaacaggctctcacaacctctctggaggacatacatacccctgacgccctaacatcccccacttttccctacttcacactaatgtgccacagaccaaggacccttttcagaagagcacatatccagctatgacaatcctttcctcttgcccgcacagtagtgttttctgtcatgatgtgacattttatactgtatttccattccagaataatagcaaaaaagaaagtagttattaaaacttaaactcattaaattaaataggaaatttcaacccactgttaaactactgagtgactgtggctgctgttctggattgcatagctgtagcatgaggtgggcacactcaggatgtctgagcccctcaggcacacaagctctctttcccacaattctccctatttaagaagtcaacagtttctcaggaaagaaacccgagtcaatagatcgtctgagacagaatgaggcgtacacaaacaaggaaatggagatctctggttggaagtggctctgccatgagcctaaggtattaacaccccagacagaaatctgggaacggagcactggggttgggtcttctagtcctgcttcctcaacagtaagtaacccccataaatataggatgggcctctttagatggctagaaggcagcattttcatcactttctagtagaaactaagaactattcttcagttactgtggactagaaggatgaccggggcagaaattagcatactcagcaagacactacagttacaatggctgaagccaggttcactcctgtctccttttgggccccagccttgtacacagggcaggtgtgttgggaaggtgcttgtggctttttgtctatcttgtttttcctttccagcctaagttgttcaaaagacctgctattttggcactaagaaattagctgggtggtagtggtggcagcgtcacacgcctttaatcctagaggcaaggcaggtggatctttgtgagttccaagccagtatgatctacaaagcaagttctaggacagccagggctgttacacagagaaaccctgactccaaaaaaaaaaaaaaaaaaaaaaaaaaaggctgtgttgtgagatgtgtctgtcattctttctctccgtccactctgttttctcctgttaaactggaatggcatcccaggtttacataagggttttgtttctgttgaaatgagccacacaaaacatcctgtaactttaaatcacatatttgtgaaggcttattacatacattttcactgatttatgtcattccatattctgttatatatttttatggcacgccatggcttactgtgttagctgttgaacaattcttatcatgcagcttaatgtaacattttcttgcatgaaatatcttaagattactaaaatttgtaaggtgcagtgacatggactgccagtgaccgtggccatgtgagcaggaacactttcccctgttccgtatatgtgctttaaggggcccgctgctgtctctttccacttcattataattcacgctgcatccagtgtaactggaaaactaatgaaaacgctggggctacaaggctttattttactgttgagaattctcagtggttactgtgttatgtaccacctaattctcttgatgttgcttttttttaaaatagtgatttttattttcagtctagtgatccatttcattcattaaccctctaaccactgagtgagctccacgttgcaaagaaagagaagcacctcggattctaatcatgcgtgaacctcagtgagtgtgtgtgtgtgtgtgtaaacgtgtgtgggtgtgtctgttcatatcctcattgccattgaacactatggccttttggtcagtctcagacgattaaagtgctagagtaagagcaactgaaaaaatgctgtttctcctagaatatctcagtgatagatctgttgccaaagaaaaatcaggttaaattcaataaaaccttctcagtactcccaaggaaaaactaagccagggcataaggattttagtgtcaagtttccctctctccattggatttcctctccttaaaacaaaataaacattgttctcacccttcccttttgaaaaaatcatttgccgtggcaggttgatggcattagacccggggtacaatctgtgcagatttgtatcccaaacagcaattgtcattcatgccatgctttgtgtgtcaagtggtgcatctgatgggaaactgcagccccagatgacgatggctgttttggtatgtgtgggatgtcatctctgggacactgggaaacagctcatggccatgttttgatcccacacttctaattttaaattgtgcactgatttctgttctctgtgtatcaatgccagtgtgtgtgttcattttagtaataactagaaactgatctttcacgtggaattcatagtcattgtgtgagaacttgtctgtgcatctcgacaatggcacagctgcatcggtatgttacattctccccaaagcaggagcacgttgacttcccacacacaactattgctgatgctgatgctgcatgtcttgtgactgcatagccagctttctggacagcatttttacggcaccctgcatgtatctacagtagattaagtttacaactagcttagcatagtggcaaatgcaatctcaggaggccaagacaggaagagcacaagtttgagaccggcctgaggaacttagtaaaaccagccatcaaagtttatattaaaaagaggagatggatggctgggcatccagcttagaagtagacagttgccttgtgtgcagtgagtcttatctctagtagcgtgtgtgtatgcgtgtttgcgtgcacatgcaggcatgcctgctcatgcattacccccccacacacaaaaaaaaaaaaaagaaaaaaagaaaaactaagaataaaaacagtgacaccatagaacgtggtattaaatcctgcttaccaattcctaccctaaataatccatacttgaaaaagctgggcacttgagagatttgttgtctcagcatgtcaatggtgtcacaaatggatacagatgtcacagccaggatttgtgtaaattaatgaattaactgatatataatcaacatcaaaagataccatccaacaaaatatcattcactgactatttttcacataacttagttactttgtgatggccataggtgaaaacataccctaattctcatgcatattaaataaatgcaaagtatatgactccattgcctttatgtaagttgaagaaaagactttaattcttttaaatggattcttttccggtgtgctccctgggaaagcaggcgttctgccaagctaatggaaaggctgtgggattcacttatgattcatttaggaggtgagggtcaatgtgagacagctaaggtcgggggctttcattaggtcatttacttcttctttgttcttggtcaggtcactgaccagacctctcacagagatggaaaccacacttgcaatttgattaggagagcacatgctggaagtttattttaggtgggaacaaatttccctgaccaaattgaaagccggagtgtgaaaaagaatacttatatatgttatagacacactctgtgaagtgactgggtcacaggctgttttgttattagaagtatctagaaaagcgtcttcataatggaaacttccccaattcctgctagctggagtctcaaatctgcttatcttccttttctcctatgagacatcactttccttgtagtattgtaatatttatacaacgttgctaatttgtacatatttatgaaagcaaagagtatagtcattctagtcactgctctattgctttgaagagacaccatgaaccaaggcagctcttatgaaagaatgcattagttgtgggcttggttacagtttcagagggtgactctgtgatcatcatggtgggaagcacggcggcaggtagactggcgtggtgcaggagcatccgctgggaacttgtacctgtctgcaagcaatttgcaggcaaagggagtgagccagggcctggcatggccttttggaccctcaaagcccactcccagcggcatacctcctaatccttccttaacagccccaagtgggaaccagtcaaatataggaacctattctcattcaaagtaccacagtagtatgacctatcctcaaactctccatcagaaaaatatgacaggtattgaggcaaaaggaaattagcattttctaagatgcccacaacctttctgccgccagtgccgccgtcaccgctgccgccgccgccgccgccaccaccaccaccacaccaccaccacacaccaccaccaccaccaccaccgtccaaagcagcctcgtctgttccttgacagggtaaggtccccactgtgttcccttcatcttcctttcctgctcctctggcttttcagacagcagctactggatcttttggaatatgaattgggtctgcctatgctttttgtagttccttcatattgtcgttgctcttggtctggccctatcacataccaagttcattttcaaaacaggtcccttgcaattgctggtggttctgctttggaagcttatgttgtgaaggtctcagaaagacaaactcctttactccacagtttaaagagtttcccattgcatctcctttatattctctttgaagaatttagtattttattttaaagtgttgctcgtgtatttgttaacttggttgttatgtctcagtgctatgagaagaaagctgtgaagattattctgaacattctggttgctgtgtgcaaaaagatctcgtgtaaccagtgaaaggggtttgaaagaatgattcaaaagtaaagtgttttaaatcttcttacagataagtgtgtaaagccaatttaaattttcacattacagtcaaaactaattttgaaaaaggactcaaacggaatgttgtatgattgaattcatccaattgaaattatagattttagcaattctgatgtgttaaagttactggagttttctgaatcctaaaggacaattcagagcacattctcctccccggctccatatgtcacttcagaggaaacacagcaaagtgaccctagaatgtacaaggcccctaaagtgacactaagctggcattggcaggtctggaagagaagcaagggccattaatgttctgcaactgtgattccttcctctgtactggcacaaagtgaacaaatactttaaaatcggtatccccactccccagggaggagatgcagggacaggaaactaaaatcgtggtgattcaaaggggtctgaactttttcaggagactgggtatgtggagttgatctgagaacgccctacctttgcttccctgcgacagcccgtttgtccttctgcctcaagtgactgtggtggttctccatgcccaccaccttgtctaaaacacactttttcttctgttgactgcttttttcttccactgccaggaagcagagaagttgggcagaggacagaagttatgtggttgtttgtttgtttggtttttgttgttggaaactccaaggaagaacctacaaagcaccaatgctaacaaaatgaagccagaaatacaaccaatgaaaataaaggctgtagagcccaatcccaagggatcttctccaaaacaactgtcttgcctaagagctagggatcactgaagatgtgtgatgggaaagctgtaagagccaaaggattagggagttggccgtgagatgtgtctcttagtagtgtcagaggctatacccatgaagtctcaccaacatgactggcaaacatgaaccgaacaaggtcaacaacagtagacatgtcaaactacacagggaaagactatgagacctcagtcctacacaaagaactgcagggatctaaggaatcctgagagcaggaaaaatagtcttccccagggtagagcacattaattgtttttccagcaccaaatggtcagccctgacatcatacgtacaagtaacattattgtggtgctttgaaagaaaatggcccccaaagaaagtgccactattaggatgtgtggccttgttggagtaggtgtggtcttgttggaagaagtgtgtcactgtggagatgggctttatggtctcacatatgcccaagccatgcccagtgtctgagaccactgtgcaagatataggactgtcagctccagcaacacgtctgccatgtcccgccatgatgataatggactgaacctctgaactgtaagtgagccaccccattaaatgctttcctttataagagttgttgtggtcatggtgtctcttcacagcaacagaagccctaactaagacaattataaagactgagcagagtgtatttatgaatatgtatgtatatttacataagtttttaacaataattaatgaaaaagaggttattgatgtgcaaaagagcaagaggtatatatgtgagggtttggatggcagaaagggaagggagacagaaatgatatgattaaattataatatcaaagagaagaaaaagccagggggtgaagactaagggacagtctgtgatgaggaaggaatgatttaactgtgtagcaaagatacagatgccgtagctcccagattagatgctgaagcaccttcacagctgtgatcgccacttgtagggaactgttccttccaatctaggtgacacactgcacatcagatagtcttctttcagggtgccccgttgcccaagtgtggcatatacagcttggagttcttggcagcccatagtttatatggatgtttgggttgtaaacttgaccccaaatctaagtcatccttgcctctttttgaagggagtaatgaaaagtttacttactcctgtcaactgggacctgactaagcaaattcatagtcagtaagaacctcctctttgattaatactcttttttgagaactttttgtgtattttatagaactcccttaggaacattgtgacttaaggtttttttttttttttaatctatttacaaatgagatagagactgagaaatccaggtatttgctcaaatatgtgccactaatgaggcccagtggtctaaactccaattttgactttggaattgactttatctcttattacatgcgtttatattatattacttccatatgataaacttgataatacaagccagtaatttttaattttctaaaatggagaatcagataactgtgagcccagtacctattcatattccaacaccagtctgactcttctaagcaggaattgacattaacaatgtgctgtttcaatcggctttcattttgtacggatagttctgagttcatgctatgatgctgtagaaatctctccagcagtgaatgttttaattatttgttaggctcctcatggctgtgtttgggtttctttgagattcagttttacacccttccgattgttggcaaatattcatcatgcagcagacctacccatctgttctgctgccagcccagacatcacaacagtcaaaacagcagatcagcctctgccatgaatggagatgagacagggcaacggaatgcatgccgcagcccagatgacagacgtggaagcagatacaggtggaacttcccaaatctaaaattctctcaacctaggactttctgagttcaaagattcatattttggaatgttttagatatccattcattcattggagcaaaggattttatatgcagcccaagctaacctcaaacttgtagcaatccctttgcctcagctgcagcattgtaagcattatcaccacatctggtccatatatatatatatatatatatatatatatatatatatatatatatatatatatttcaaagtctgtgcaaaaaaaaaaatctccaagtcaggaaaaaaaatttccgaatatgagagacttctagcctcaagcatttctgataagggatatactctctatgggctatcagcctagggaaatttagagtttcatccagtacagtgacagctgagggcatttatgccagaaattgtgtttacagatgtcattggacttggaagtgagtaagcagaactggtgagagaaaaacaaatagacacgcaaacaccacttagtggaagcctagtttatgttatagataaacatgacaattgggcataagagtgactgatgatgctctctgggttgagggccatttgggtccgtgggtcctctctatcctctattgtctgaagcacgtggatgttttgctgtgatgttccctgtatttgccatttctctttctgaaacatgtgtgctgctgggttctagggtgtctttatggttagggttagggtacccacgagtgaactccattagtggggagcaaaaaccaaagtaacaaaaataaaaaaaccttttctttaaatccttcaacacatagaacactgcttttaccccagttacagcagataacaatgtccacatagcccgctgtcttccaaatgcagcgtttctacgttctgcctcttctttcttcgtttctatgaagtgatcactgccgttctgggtttcattccttgtgtttctttgcagtttttcacgtatgcattggcatcagtgtttggtttactttgatttttttttttaaatgtaatataaactgagccagcttgggctccccaccccatttcactaatttttggcccagcgctctgagatttttttcagtgatgaagcatctagatgcagttccttctgctttattgctgtgatgttttctacaccagcgtttatccagattgagtctgcagtttatccttttgggtgacaaaatcatcaacagacctgggtcctgcctcacgttcatgtctgggctgaggtttaattgactgtgctgtgtgctttgggagtctacttcatagttgttcaggtttactaaacgtagtctctgtgtaggggtttgttttcccgctttccagttgaggaaggtccaggcattctctggcgtttgaatacacctgtggtcaagctggaagccggttcctcgggatagttgcccgtctccagtgagaaagctaggggtggtagcgtgcatgggaaggatgaaaaatgatgtaattatgttttactttatggtattttttttttttttttgcaatttaaaaacacgagaaggggaaacctgtgtccttacagaccagttccagttagcctttgggctttcttcagcaggtaaactctgctgagccttgatcatgtcctgtttggccccatctgtgaagataaggcagaaagacctggcctgtctatccaagtagtttatgggtaaaaacaaaaaggattaaaatttttctctaaatagaaaactaactgaatgttcctactcattagtgatgactttcgttagagccttgatggacttactgttgtgtgacatttttaagacggttcacaattaagaagaatatagtgctgttgaataacaataagcgctgagtaaaaaaaaaaaatgaagtggtgctgtgttttgataatctcaaagtaatttatgtatttaaatatgtgcatgaaaccctgcatttatatttttctctgtcattgacttcccagtagcttagttggattttaaatatttatgttttatattttcctgcacctgtcccatgacaatacactagaccgtgcaaccaaagatgtatttagtgccgggcttgtgagaccattttattgctgtcccagtcttccctggaaatgaagctgctttttcagacgctggttgggtttccatgtcgcagtcagtatctgtgcagaccacaagcttcccctccgagtgtatgtggcttttgttccgtttaatgtgaatgagaaaaaacaaaaaacaaaactcagcaaaagcatcttcagagaggtgaaaaatatttttaaaaagaaatgaaccatatctgtgaatttaaattaatacaaaatggggaaatgacatagttatttgaatatgtatgcacttctataatattgttaatgtacacacagtgggtgatatgttcttatatcaaacaaatcttctaaaaattagagtactttctttcttatgatttgagatctaggatgagaaataaaatggatttcagggtgcttcttttgtctttttcagtctcaaatttctctcacaactcagtattatgatgaccctgtttcccttagattaataccgtgccttttctggaggagaaaaaaattgtttgatgaattttgaaacagtgactaaaagatgaaaccttgactgtcttcagttgatggtatcagaacagagcttttttgttaatatgtgtcttgtaaaggctggttctgggagccaggtcaggtagttcagaggataactagcaagccaagttgtctagcaatgttctcttgaaagaagcgaattactttgttcagtaagagagataagcaggactgtatgtagtattgtttttactcacaggccaggttagagctgtggtttattcgaagccaatggccattgcaggcattgggatgatcccaggcatcatgggaagaacaccagctgtagtaggtggacttcatggaatacatctgggtgggactcatcttggcctttggacaggtcactttcctggtacatgtacagtatacagtgcaggctggggatccagtcaggaggttgatgggtctgttgaccttgttccagctaatgtggaggaggcacatgacccaaaagcagccatttatttctgcctctctgtcttgtctatagtggtggtttgaataaaaatggccctcataggttcacatatttgaatacttggtccccagttgatggaactgtttgggaagcagtagggggtgtggcattactggaggtgtgtcactaggggcagactttgaggttttaaaagactcctgccattcccgtattctctccctcatacggtttttccatctcagctgctgaccagctgcctacttctgtgcccttctctgttgtcataaactgcaaccctgagaaccttaagcccaattaaatacttttataagttgccttgtcttatcatagcaagataaagaaactaagacatctatggtgttcctttgaaatgtgtttgttacatattatccagcatcttcaaaatgatcaattccattcatcagcctacaggttttgttttgttttgttttggtgttggtagtgtatgatggtattttgtttatatatgtgtttgcacatttacttatttgctatactgaaaattatttctgtatgttaggcaaacgctgtacaagtgacctatttcttttcctttctttctttcttccttccttccttccttccttccttccttccttccttccttccttccttccttccttccttccttccttcctttctttctttctttctttctttcttttttggtttttcgagacagggtttctctgtgtagctttggagcctatcctggcctcaaactcacagagatccgcctgcctctgcctcccgagtgctgggattaaaggcgtgcaccaccaacgcctggctacaagtgacctatttcttcagctatagtttttgttgttgttgtatgtgtgcatatgtgtgtatatgcatgactgtatgtttgtggtcatgactgatgtgtggtttcacttggacatgagtatacatatgtgtggaaaccagaggttgatatcatgtattgtcctcagctgatttccacttacgtgttgaggaagaaggatcttttccttgagcccagaactcattgatttgggaagcctagccagccagcttgccctagggatgtcctatctctgtttcccaaaatactgggataacagttgtccttccacacccgcctggcatttatgcaggagccgtggatcaagattttggtctttatatttatgtgacaagctctttacccactgagccatcctctcagcccccttaccttatttttattttagcatataataattttaaatatttgtggaacacagtgtgatatctcttcatgtttataaagtttaagaataaaatcagggtaattactataaccattatttcaagtctttgccatttccttgtgttgggatcctttaaaatcttctccactagcagtttgaaatgtatagttaaatgatgtccattatagccaccgtgttgtgctccttatctgttagtttctcctcccaacctatgacaaccatcattctactctctgcttttataagatttccttccttccttccttccttccttccttccttccttccttccttccttccttccttccttccttcctctgcctcatgtaagtgcaaataagtgctatttgcttccaactttattccacttagcacattttcttccagtttctttcacattgtcccaaaagattaaatgccattcatttctcctgctgaataatctcttgggtttgcatcacattttcttatttatctcttcacagacatcttggttgatctcatattagctccagtgaatagttctacagtaaacatggaagtgcacacatttctttggcatattaacttcctttcctttggatatatgcccagaaatagaatttgtggatcacatgtgtgctggttctctctctctctctctctctctctctctctctctctctctctctctctctctttctctctctctctctctctctcctccctctctctgtgtactagatacaagcttggttctttttttttttttgaagaaaagtctcaactgagcaaatgtctccatcatatgggctgtaggcaagtctgtaagctgcaggtctttttcttgattaatgatttatgtgagggggacagtctattatgtacagtgctacccctgagaagtggtccttcatatatatattgagttagaggagccatggggaacaaaccagtaaagaacactcctccgtggtctctgcttcatttgcttctaggtccctgcctgaagttcccatcctgacttcccttcatgatgggctgactttgagatgaagtaaaccttttgttccccaaattgcttttggggaatttttttttaatcatgaaatgatgctgaattttattgaattacttttgtttttattaatgtggtcaaatctttcattcctttgctgtatgatgaatcacattttattgacttacttagataaaacagctttgctcctcagtataagtcccacttgattgttttgtttgatttttttgatgaagtgttaaatttgattccttagtatttcttgaggcatattttcatcagtgatgttagtctgcacttctctttgttactgatttgcattagaatagttctgttcacatacaagtctggaagggctaccttttttcactttttaaaagtagtttgagaagaattgatacaaaatttctttgaaaacttgatagagttcagcagctaaaccagcacagtggtatttttgctctaccacattctgtgcagtattaatgtacagattaaaggtttagattatgatttggtcatctgtatagatagaatccacatcaaattagattctgattgttatgaaggaaatattggagtgtttatctgagttgtatctgtttttctacatttatcgatatgaaccattttacacaagagagtgcagggtaatattctacctaccaacaattagcatctgcaatagcagatattcagtaaatatgaaaattgaatatcacacaacatctaccttgataaaaatttttttccttaccaaaaatggaacattattgcttttaatgaaatttactgaagcacagtaggtggtttaaggcccatggaaaccagcagctctaaaaataatggaattaagatttcacattggcaatctaccttgacaaactttcaactttttaacataactctacatatacctaagaaaatgtcacctctattggaacatgtcacagtgtgatggccagtgttatttttcaacatgacagtatctagaatcaatctggtggtgactgtgagagattaacctggttgggttgagtgagttgagaaggtcctcccactgtgagtgatgtcatttcctgggatgagcagagaggaagctgagcagcagcagacattcatcaccctctgcattctggttgtgagcaaggcatggctgggtgctgctgtgagcttctgctgtctagacttccctgactcgatggactgtactcttgacctgtaagctagtgtggatcataggtttacttgggcctacagtggcagaaaaaggagctaagttgtagactttaagttcttgagtctgattcatgtttttgaatgaagcattcattatgagaacatattgtcatactgtatttaaaaattctcatctacttcccctattcaatttttctttccttttattcctgagtgaatgctgctgttttctgtgctttcaccatcctcattaacctatttttcttcttaatgtttcctgtctgtaagaattatatattgtgatatcactggagtcatcacattattcagtaattttgataatgtaggaatgtgcccaagacaggagctttaacaaagataggaggtgtgtattaagcatgtttctgaaaatcatttcctttttgtgtttcatggcagtcccttgtaaatctgcatttagaatgataattcatgctaacagctttcatctcccatgaggtagcagaaatcacttctaaaatggcagaatgaaagagtagatagcaaataaagtcaatgagctgtcaaagaatttctcttcatcaaacaagccccaaagcaccctgtgctgttctagagtttcctcacccttcattctagggttcttagttcaggattttttttttttaaaccacgagaaaaatgaataaacatatgtggtcagtcaaacagaaggtgcttgcaaatagtaccttggagcggtgtttcaatcttcaggaaaatagtaaaggggaaatccaacattgattgctgttgctaggcaacgtcttttgcagcagatgtacccgggacagtggtgctgtctgccagcacaaccatgcaggataaaaagcagtacaaggctatgattttcccgagaacctggaatcagccccatgcgtcctcttttcctttcatctgtattttgagaagttgatatcacatgggccaaatatgtagacagtgagaaatttggagcttttgggtggtttttagactggcatgaatacatttgttgggccaactccaaaagaatcaaaatttttatttttttcaagtcatactaattttgctatcggttcctgtgcttttccgttcatttatcatacatatcctcatatattcatatattcatctaccgccaagacaaatgcatgtgttcaaagctctgtgcccttaatagtttggcatttcttgtcctgctcactgtatggtgttgcatcattttgtgtgtcatgagtgtgatgaaggaaccactgtgtcagtgtagaccttttgtaaagaagggcctctcgacttccactgagcttttggagcacagtaaactctcctgggtagttctgttaaaggatattttagcccctttctttacaatcttattgcccctagtctggaaggtaattcaggagtatgcattgtatttaaacttctgggtgagtcattttgatggtagaagagccattcttgagaaacactggagtagatgtattagtgatgacttcatcaatgtcacttgtcagtttccactcattcctggagaagttgtttgcccaggtgttgagccagtgctccaccactgcaggctgattcttcatcctcttggtgctggaattgctcttgattcgactgagtcagatgagttcatcttccttcagagcttggtctctgcacatctctggaggcatttgaagagctgcatcactgcttgagactcagccacctcaagaactagagcaacataaaaccctgtcagcttaaatccatgtttacttaggcaggccccaaagatgggcagtgtagacttctttatcttgaaaaaacaaccaatggttcaacaaataagcaaagcagcaagtacctgaattcacctctttgttgttgttttaaatctcaaaggtgataacatcacgtttcagtgatctttgtattgtgactttattcaagtctttgataaaaccttgtatgcttataaagtattggcataaattaacaagtaatagagtgtagtctttaatagataatttgtttttttttctctagtcgtgtatgcttggaatccccattttggttagtgtgtgtgaaaatcttgtccttttattatggaatagtacaaattatatatggttctcattagtttgtctagttcgttaccattcgtctatcatgttaaatgacttttagatgactcacacatttaagcctgttccaaagttgttaaggtttgtaatttatcatacagccattcctgaacctcttcgtgcttcctgactagagtgatgttcattgaatacatattgaagaatatgaaaaaaaatatgttgccctcaaagcattatcagtaagtgtgtatgtgtgaggaggtttacattgttgctggtaaccaatggtaaagcttaaattatatatttgataattgagacatttttcattatttataatttttaaactacttccatttaaaaattagccactctcatttcagtctgtgttcaacagtgaaatgatacattttccaaatctacatcatcatatgtggtttgacctttagttgaatctggtggtaaagatcaggatgagttatgcttgagtagaaaggggcttttagcgttgctctgtttagtgttgccccatcatacatgctgtgtaatattattaattcacttgaatcataatgagctaaaaaaaacccataagttgattttggctaatgcattcttggttgttataaaaaggctataatacctgaatggttctacacaagcagcaatgcattcacatattgtctgcaaggcagactggcacacaattgcctatgagagcacatttctgcacgtgtatcctccttgtgtgtgtaggtgactcctgatagtccttgcagtgctctcattttcatctgggaagtaagtgttgaggatgtaacaaacaatgaatatttgaagagttaccacgaaacctcttaaatagtaggagaggatgaatgactctgagtgctttaaccaggaacgactttaaactcagtctgcagtggcttgccagtgagaatgggactgtctacctgtctccattcacttgggtccagtagggtctgtgtacatccagcagtcacagcaaatcctcgagaatgccctgcatcatgggaagtcttactcacaaggcctgggcccttgtgatgttccctgtttagttttggtcatataatgactcaagtagtggatctactgtgacagtaagggcctacagagaggaagagtgaggctttcagtgagcctgtgaggtaaagataagtatcattctaaaattgttcacatcccatagaagtaaaactctaacttcactttatagaggtgattttttgtgtgtgtgtgggggttcgagacagggtttctctgtgtagctttggagcctatcctggcactcgctctggagaccaggctggccttgaactcacagagatctgcctgcctctgcctcccgagtgctgggattaaaggcgtgtgccaccaacacccggcgaggtgatgcatttttgaaagctccttattaccagaaaatcaacttcccaccatattttctctatagtgttagactatatggaaaacaattcagatagccatatgacatttaggaatgctttaaatctactaagattttagatagcatgggtttataaagagaacaatttttctgataaacatcttgtggggaggcctaaagaaactgggaatcacctgggaatttttgcgtgtatagcacctactgagagcctgtgttgatggagaagggtgtaggtttaactgggactatacgggtgatttgaggggaacagtgacctaacagctggcccagtgcaatgatggattattcatattggaaagcttgaaagttacatgttacttgctttgtaagttcagcttcctgatttagtatgtttggacgctttagaaaatgtcttcaattttgatgggatgggtttgcaagcctgtaatcccagctacttgggaggctggggcaggagcatggcaggttcatggcctgtttgggttatagatgacattcaaaggagcctgaacaacggagtgagtcatatctcacaataaaaagtaaagagaagactgagtctatggatccacgatagagcccttgcttattgtgcagaagttcaggttcaaccccccccccccccccgcaagaaagcctcagacctttcttaaatgtacaattgataatatttagagccctaaacatgttttagtttatcattatttaaaaaaattaataaaagcagtgcatcccaagtttatttatttctattattattgttattattattattattattattattattattatatgctttacctttattttatgtgcattgttttgtctgcatgtctgtctgtgtgagggtttcagatcccctggaactggagttacagacagttgtgagctgccatattggtgttgggaattgaatctgggtcctttggaagagcagccagtgcttgtaaactctgagccatttctccagccccatccccatttgagaattgaaaaaaaaaaaagtgtagagaactataaaaagttacatatatttatcttataacatatattgcaggtttctcttttatttttctccctaattccctgtaattgttgtctctttcttgcatgtgggtgtcttgctctgtttattctgaaagcagtggttttaagcctttttctcaagtgctaggttgtgaatgttttatgcttttttgtgataagaggcaaaattgagaccactaatatagctactcacttaacaagagagaaaacaaaagttagagcattttattcttgaaattcagattcagttcactgagaaggtgtaaaccaaattgaaatacttaagaacaaaatttaatttttaaatttttattggaaaatgatatattttatattatatttttattccttttcagcttccaggtgttttttttttatgtttttatggttctaaggtcatcttggcatgaaatttgatattttgatataatttctccttcagaagtttttatttaaccacatttacatctattgattagacttaatgacttattattcattaattattaattactctattactcagtgcttcttcagaaaccctgtttcctgaatcttcccccacccatcccttcagtcgattagataacaacaatggcagcaaactttaagtagtttgccctttgcttctatggttttccttgatgcagactgaaaagatttttaaataagcatgttcaggccctcttctataatcaatgtggtgtaaccactatttgtacagcattgtgttttgctatgcatcataagtgaaacagaggttaaatgtactgtctggaaacactgtgctgttcatataagacaatgagcacaagtacgttttgctttctgcgtcagcttcttggattccaagggctgactgtgtttccacggtgtccttggcatccttgtatgctcttctgtcagggttaatcttctctcttgttctgatgttgattttattactatctcctctggaaagataaattaacttaggcaatctgaaccaaaataatttgttcgtggtcaccaaccctctgcagctgggagttggtaaatccatctccccacccccttgtccatttttcccttggctggaagaagcatgcactcacatgtgctggcaaacctcacctgactgagaacatgcacagcttcgagacataaattgccagtgaagttgtgcagggcgttgctgagacacagtggctttttcctcccacggctgttaaaactgtccattgtgtggggtttgccatttgactctcggaaagggcagggctaagggcaacatgttttgcatttttctcttcctaggcatctccctgcacaaactgcgcttgtaggttcatattttcgtttttccggggtgtgtcctgcaggtccttgttagttatgcttgtgtcaaataacagaattcccatgatgtcagatttcagtgttactttggattagaaaagatcccacatcacgtctgtgcttcttgcttccatcctacttgctctggttcctctgtcagatgggcattgtacccatcggttgtgtttccataaaataaaggcaaagccacgaacgggctctgtcaacagtcaaacagatgccagcctgggaactgcttttcctgccttggtttgtgtccagaggcttcctgtccattccccagccctgtctcccgcagtaccatcagaaagaggctcattcttcttgttactcttcttcctttttggaacctctgtctgccaaggaagttgcaggtcttggtttgctggatcaatcatgacaacagtaattctacagatatatagttttccgacttgtccggtttctgttctaccagcatgatccctttgaaaaccagagattaaatcattgattgagctaaaaaggatcaatttgtgaaaaaaaaaatcagatacaaaattggaaacacaattaaagaaatcctccctcacagggtcacatctgattctttttttttcctactttcaaatgaaaacaaaacctaacatggttcattggctgtagttttttttttttttttaacttttgtagacaggacagttttctcttttctctttttctctttaccctacatctttggatgctgtttcatcttttagtctttattcaggggtccttgacaaatgtcataatgtctggctttttcccgtgggtcatactcttgtgatatgatgtgtctttcagatcaccttcattcagtagctcccagtctgttggcctttgccgctcttatgctgttagtttgaaataggatgtgtcctaaaggatttcctcataagctcggatggatcataggtttccaaataaggttactgtaacctgagtcagtagtaaagatgaatggatcttaaaaagagctagagagatggctcagtggtgaagaattcctgggatctttctgtgggcctgaactgcctataaccccaacccaagcagatccagtgtatctggcctcctcagaatcctgtacacatatgttcgtacacacacacacacacatacacacacacacacacacacacacacacacacacacacacacacacttcaaaataagatggatctaagtaagtaaatattaaagagaaacctacatccagataataattggtgatgtcatacctttgtctctccttcaaattaatcattgccactgatgataagattagatacatcagttatttataacttagaaattcagattttgtgatatgtggtacagccttgtcatatggtctagatgtatgaataacttaaatctaacttctgtgtcccattcccagggtctttattctttatagaagagactggtcatgtttattttaggtaatgtgaatatccaaaacctatccttttttttttttttaaaaaaatatgactagtgattttatttatttttgttctcataaacgtaatattttaaaatttattcttctcttatgtgctaccctctgattgaagcttcctctcctcctcctcttcccagctcatcccccatcacttcctccccacatcaacccctcctcctttcttttcacaaaaggacagccctcctagggacatcaaccaaacatggcatatctgtttgtaataaaactaggcacatcccctcatatcaagactggatgaggcaactcagaagaagaataggtcccaaaagcaggcaaaagagtcagaaacagttctgctcccattgtcaggagtcccacaggcaccccaagctatacagccataacatgtattcagaggacataggtccggcccataatgctccctgattgttggtttagtctgtgtgagcccctgtgggccctggttagttggttttatgggtcgttttcttgtgttgccaagacctatcttaactgccacaactttcttagactaacattcctttctagtgatcaggaatgttctgggaactcaattttcttcagcctgctcctgagtatgccagcactttttgcaaattgatatattttacaagggaattggaaaattaatagggattatattaccacagacttagctttttgtagttgttaaattagtttcaatgaaatggtgaacagttactcaagccgttaaaaattttatatacttactctaaggtgcccagtgtgtgaaggttttcctaaccacccctgcgtctcattaaagcatcaagtgtaaagtgctttttgggccacagtgcgattagttatgtgttggtgagaatgaatgattcacttgtctgaggagatgccgagcaagcagttctgttcagcctgtgccgaaattgcctttatgcagcacactgggtaaaacctagaaatagaattggttattgattttgcttattttgcatttgttgcaagaggaaaaataatacaagcatacaaattctgtcagaacttttctctgtcatttttttttttttctgacgttggtcctatcagaactttccatatgtttctacctccatatgtcacatctgtagcaatcaacctgcctataatacctgtttaatttattagcagttccatttcccacataatttaggttactttttcttattcggagcccccaccccctttacttacagaatattgacttcaatgtaaggctttcctcgtttgttttgatacttagttgcatgtaatatggatctatttttctttttacaacttaattgaatttattttttttctagcttttcaaatatgttgagtattcctttttccacatctaagaaaattttagcaaataagtgagactcttggctttttgttacaaactgaagtcaagatagagatgggttattcatcaaaccacttaagccagatactttccaacctttgtagctgttagttactgccatgattcagagtttactggtgatgtaagacagaggtaagaaacatagtttatagaccatgagatggggttttaagggactaccagaagctgacctcatgtcccttttcttagaggagagggactttacttaggccttcccaccctggatcacgggaagggattctaggagaaagaccatcctctctttctgttgttctgtgtcttataagaaaggaaggaaaagagggaatgtaggatttgactggagaggtagggactccctagagaatctggtaaccttgataaaagtggtagtcctcatgttttttcccaaactcaattgctcaattcctgcttgcaagatccactctgggtttctatctttttctcctctccccaccccttccgcttacttcatgtttttaggtgttttgcctgtgtgcaccctgtgcatgcatgatgcccacagagacctgaagagggcatcagattccttgggatttgagctacagatggttttaagcctctgtgtgggcgctgggactcaaaccctagtcctctgcaggagcagccagagctcttcaccattgagacatatctccagcctccttttttctgtatccttatatctaactcactgctcctttgagtacaaactctctcaccctcatcttcacatatcccatctttctggaataaccagatcatgtacaagtgaggagatacaaggaatgtaaatccagtctattccagtaagatcccaaaccaaccagaactagacacgggcatctcaggaatctaatgaaactgtaggctacagattaaaacctggttctgtttgactatgagttctcaacaaattaggttatattaaaatagtttatgatttgaagccagtagatccttaatgatgctatgaagggatcacttacatgtatgattaacaaacattagtcatctattttgataactcatagatgttccctatctccagatgtttgaatgtgttctaaaatattaaatgtgtagataaataatcttttatataactgagttagtataaaaatttccttcttaagaagcaaaattttgctaattttgcaggaaaagcaggggttttgagctatcatgccagctgagtatacatggaaccagatggactgccctatggtaaattgttgaggcctgtccttaagtagctggtgagcccttccatggttagtcaagtgaagactccaagcttcataagataaaaagccgaactgttcttttagggattatgtaaggccacgctctaatctggacacattgccaagcattgggtacttgaaggtacagtgcccggcatctgccttcttggagcacaaacttgagatgggaaagatgacaaggggacatgtggggactcagcagtaattgtttgagtgggatgcaaaaaaaaaaaaaatgtacagaagccagatttcagcaacctgagagatgagtgacaggtgagaaggtggggacagtgactttcagagactgtgggggcattgccattgattgatgatggcctatttcttcgggctgcctgcagtatttcattcttaccccgtagaaaactttagaagtcccacatagatattcttgtgtgtccctttgaaaaccagaactggacaggcagcctgggttttgctctcattcgtggcttcaccggcactggtgctgtctggccccacagctgggtgtgctggctggccgtccggccggccatatttgctttggatgtgccctatctcaccagtgaaggaagtagctagattgagagaacctgtgagaagatggcatcaagtgaagtttcttggtcctttcaagtattaacagttttgaagatgtcacttagtgactaagactcctcagcaaacgagagcttgtggaaagagggatgcaatgggctgagtgctttccacaccaaatccacgtgttgaaatcttagctcctcgaccctcagaacgtggcaatatttggagctaataccctttaaagagagtaacaccctaacccaatctgatgggtgttcttgtcaccaaaggaagggacaacagagacatatgtgcccagaagggcagccacatttgcctgtcaaagagtcaggccacgcggaaaagccagatgtctagcctccaaaactatgaggaaatcctcctgtgttttggtcactcatatgtggcattgcattgggctggcttttgcaggtgattcaaagggtcctgaggagataactaatggagttgggactgttgactcttggagggcagagaccacgtctgagggtaacgagacaacactgcagtgtcttttacacatctggctaagggttcaccaaacgcttactggattaattttacttgttagagtgaaacatagccctgtggtcagagggaattgtgggtagtgaaaggagtattgtatgtctttgaaacctttggcccttatgttctgtgtaaggaggatttactaccctggtgttgcaggaggcatttagaagctgccttcactcaaagcatcaactttttactttggtccacagggtaactaaaagctgggtgggagactggtgtttctgcaaacacgtgtgccttaggtgatctagagatgagtactcattttctacctggtgaatgggtttgcgttgctttatatagaattcacgtatgggcttgggagatggctccccaggcaagatcaccctctgctcttgcagagcatccgagtttggttccagaacccatgtggtagctcataattgactgtaactccaattccagagggcacatgcccttttctgacctctgggcactgcatgcaaacacacagtcaaaatatccagataaaacaaaaacaaataaatgttttctaagtataaaaaatatgggctcttctgatcctgtttgtgtccttttgtcactggtctcctacgtcatcagcaccatccatttgggctgacagacatggagggcactctgagtttgctaagatgagtaaatttattagtttgtctttgtggatatttgtttccttgatgctgctgagttctgcctttgggctctgaaccttgggtctccatgtcagtagatagcacttttgtgcggtgtttgcaagacagctcgttggctgtgaggaactcttgttgtccaggctgactacatatgtggtgacttcagcaaagtctctctctctctctctctctctctctctctctctctcctctctctctctctctctcacacacacacacacacacacacacacacacacacactcgcgtgcactcacatgcatgcacacacacatacacgcacacacacacatgcaccccccccccgacttctgtttcaggtctaggaaagggacggtgatactcccttcacatgtctattagagaagtgaatcacaatatggaaaagcacgcagcctagtagagttctcggggggtaggctggctaccgctgacccgttgtcctctgccacagtgaatgtctgtgttcatgactgatcagcctccatggctctctactccaggtccaccatcttggctttggtaatttcacttccatatttggataagtggtcagtgtgattatccataaagagcccctggttgttttgagctgggtggcacagtcctgcaaatctgtaacacaatgtccccttgggggtcgtcccagtagctcctactgccctgcaaatgctccagtctctcccccaacctttgtgctggggaagccagcagagagccttaagtgctgggcaagcgtgcttccactcaactatatcccatcacttcccagcttttaaagcttaagatgggggctgggcattggtggaactggaactggctctgtagaccaggctggtcttgaactcacaaagatccacctgcctctgcctccccaagtgctgagattaaagctgtgtaccacctggctaggaaaataaaatcttgaaagttgaatatttaagtaaagtttggatcctgtaaaattctgactttttttttttttttgctgaaaattgtgagctttggtcatggatattggtcatctatttttcttgttaaatgttgtgggtgcaacattcaagactataccaaggtctgctagtttgggagcaccattggggctgtcggcctaagatgacaaaccttgaaccacactgacttggatggaaacagccatttgcaactgctgtgtgaatattcacctgagactcattgacggtaggagacattctcttatggtgtacatttttaatgactgtcacactatatactctaatcatttttgttaaaaatgtcttcagactttttttttcaaattcaaccagatgctttatcttacaataaaattggcttgagaaatgaaagctgttccctttagctccccctgaacactagaagtaagcagtgttcatctcctgtgaagctactggcggctcttatgattcaatgccgctcttccaacagcagctttaatcacatggctggctgcatctgtcttcccataggacaacttgccttggctgtgaagtccctgtgtcattcagagcaatgtgctggcaaggtcactactgcatatggcaaccttgtgatgagaagcttaaagctgatggggacatagtgatcttcttattaattttttttgtgtgtggtgggaagcaggccctgtactgaatgtcgtcactggcactagcatgggcaagcatacatcactagtaaaacagcttggtggggatacaccaaaatggaagctgttgggccccagcttccacatctgaccacaattacaatgtcacatctgccttttaaaatcaacctaaaattgcttgcagtacaacttggtgttagatgttttgggtaaaaattaacagcagacttttaattttagaagatcttagatttagagcaaaattgtgatgatcctgtagagttcctccacgtgctactaccaaggtttactccttcaggtaccctggttttgcacattattatagtcagtgaataccagtgtgctgctccggactatacagacttccttagctttcagggaacatcctctccctgatttcggttcccaccacactactctatttttagtcaccacgttatcccagtcttcaatttctgtgatggtttctcagactttttctcagatagtttttgactatcttgcctgttttcaggattgctggtcaagtatttgtaggatgcgccttgtagaacaaggatatagtaacatttgttgaagtgtgttctacttggagttacgtacagatttaagttacatattgaaaggaaaagtgctgttccattccagaaggccgtgactcactgttggggttagccttagtcacatgacaagcgtttcttcactacagctgtctgatgaactctgctgcagccagcctgcactggaggatttggggttttcctctgcctggaagggaggctgtggtagtttcatgtgctatgaagcattttgttgttgttgtttttatttcgagacagggtttctctgtgcagctttggagcctatcctggcactcgctctggagaccaggctggccttgaactcacagagatccgcctgcctctgcctcccgaggactgggattaaaggtgtgcgccaccaatgcctggtgctatgaagtatttttctcaatggtatatccatccctccatctgttaggggtttgcatcagtctgtacttagagttatttgtttcatcttttgctacatttgaatctactccaaagaaagaatgagtatggatgatccaggactagaaatctgaaaccacactgctagaataccctctattgatactaaacgcattgtatctcttggtgctcttatggagagtgtgcgtgtgcctgtgtgtgtgtgagtgtgcatatgtgtgtgtgtgcacgtgcgtgcatgtgtgcatgcgtgtatttgggacaaggaaagctatgctattgcaaacatagtcttactgaatattaagttaaagtggcttctaccagccagcccatgcttcctttcatgctttttgagtttacattgagctcttggtatgttctaaggcctgtgtgtggtgcttccttctgctttatgcatcctccagcctttcagtggatcattttgaggacactgttctgggtagggtactaatttggccaagttctcattcatgttcagagtaatcaagctgggacttaaataccgaacctgtggctggtgtggaaggtcgggcctccgatcacctctcctttggcactgtttctcaggtgggacttgtgcgtaacagtgtgcatttcttgaaataaattattttccataaacacaaaatcataactttaaaactatacccatgtctactccccatctcccaccatttgtaccttggccagttcttttcttaaaatgtcatgaaaagagtggcagttatgttgttttcagagatacacactttgcctgagcatgtacagctcatggtagcatgtgctgctgacagtgtcttgttgccgtgctattcttgggagattttatggtagctctttgggtgttaaaagcagtgtgtgatggacctccaatttgtcttaataccgcagagagcttctgtgacatgtgccccgttaactgcagggttcctttgtcttcgttctccctgcgctgtgtctgagggctttctgaaccacagcagccctccaagtgcccaagataacccgctccacagaggcgcttggccaaaattccagagagatctgtgtctttccccagttgtccccaaagccttcttacctcttgtatgagtataacttttagcaaaatatttcattatagcattcagatttacaataattgactggtggatgctactggtaactatatactccagacaaatatggaatattcagttcagacagacaagccattgctatggtgataggatcactaaagtaactcttagctctttcccttactcactgagtagtcttgaaaaaaaaaaaaaactactcattcctttgggcatctgctttcttttctcttagacagttatgctactctctgcctctgtgttgttctagcagtgtgagatggtgtgtatcataaaacagatgtctgggtagtggagtgaccgtgagcagtggcagggaggtgcctctctcctagaaataatttttctttatgaaaaagttctaaaatcaaaacacaatggcccaaatagaacgtaggcatcttggagacacagattggaaagaaggctaccatgtggtccatgggaaaggtatctttaggaagaatgcatcaactagggatgttagtaaaagggttgtgcttatggagggtcagttagagcgtttggggcagcagaacagtttgcaggcggtggcagcacttgtgtgtttgaatttaaagctcctgaattgtgtcacttgactgcgaggttgcttacatggctctgtggtagagcgcacacttgtatacagagccctgagtttgagctcactgcagaaaataaatacataccctaaaaacagggtaaaataaataccctaaaaacagggtaaaagtggtgtttacgtggagaagttaagcaaagaaagagcagtgtggtgaatattcacagtgccctctgggcaactctgcaaggccagatttttgtgaccagaagatccattttgtgaacttgagtcccacatgattaggaatcttttatctcatgttcctggctgtgtttctagtggtagacaggaacacgttgagggatggctagcagggacatgcttaaggacgagtagtggtaacatgccgaggaatgggtagggggaacacactgagggctgggtaccctgatgccctcagtatccagggtgtgtgattggtgcacttgctgtgatgctggtccagtgagcctgtgtttgaaacgaccaagaccaaaaattcttcattgtcactcaggactagataataaactgaggcctggtgggggcagaaatagtcaatggtctaaacaagaacgtcttctgtgctgcccaactaggtgatgtgtggagccaactgaactcagatgggatgccacagcttagatttgaagatctacactttaaaaaaagaaaaagggaaaaggaaacttttaaacatcttaattaaaatgttttagcctcagttcatttttgagcagctctgtactcttaaagggatcacaaaattgtgttcatcttcctaaaagcaaatgtttgtactcattgtttgaatagaaagctatgaataaaacaaagcaagccaaatatgcaactaacccccaggtattagaatttatccctggaagacaatgagaaagcaagagaaaagaatccaattaggcctaatttcctctgtctactatggaaacacatctggtaagactagaagaatggcttctcacaggccggggctgtggctcagtcagtaaagagcttgctctgcaaacctgaggacctaattctgatcccagcactcatgtaacatgacaagttttaaagcagtcagagctacacagtgagaccctgtctccaacaaaacaaaacaaagcaaaaatagtgagacagccctagatgatctctggcctatggttatatgatttggggtcttatgacttaatactctccaaacacaaaatgtctgctttcaccttgttcgcctgtatttagaatagaatcaagcctttctgccctgtcccccttccctttccttcttgctccccacttttcatcctcacctcctctccattccttttctccccttcctctctttgtttttcatagggtcttattatgaagcctaaggtttatcagacttccagatcttcataccttggcttctcaagagccgagataaaatgtatatgtcatcttgcatcactttggaatctttcctatatgaaaaatcacaatagaagttctttgtagtgattttaacacatacatgctcatatgtgatcattacacaggggttttatctggttctttatatttcttgctaataacagtttttagtagtgagtaatggaaaaaaaaatgagcatcttgccggcaatgttttaggtaggaacaaagatgcttgtctgtaaaatggtgtcttggcatataaaaccaacagtgactgaagactgactataatgagttacttgttcgtcttgtaaccagctatcattatgttcagaaaggtgcttctgagtcacccagccacacagagcgtcgtatttaggagcatagggtttaagctctcatccttgctgtctgggtggtcatttttaaacactgagagagtgggcatgcctcatgtgagctaaggctgctgtaacaaacaccacaggatagactgctttaaaagcaggataattttccattgtgacagcactagaagaaaaaggtcagggttctggtacagtgcttagtagggtccgcttccgggtttgccgagggttctttctcaaacagccccaactcctgcatgcccatgaagaaggtgtatatttcactggaacattccacattccgtctgttgacttagagcctccccccacccccatgacagctgatttagctgtagtttctcctcaaaaggtcttgtgtcccaaatgccgctttgagggttaaggctacagcataacaactttgaggcggatcccgatgttcagtttttaaaaaggtgggttgcttttagaagcagaagtcacatgtctaaggtacaggtgtcatgaagtgctgtccctagaggaggccaggtgatcgcccaccaggccctcggcaggtccatgcccgtgtggattattatttggaatggagtaattatactgatccactgatgttctttgttgactctgatctcccaagttttcccctgtagcaaaggaggacagtaaacttgcccttttaaaaattttaatttagtttaaatttggggttccttttgggccagtagatgtcttcaggtacctctggcttatgtaatagtgtcctagaaaagataaatgctttttgtttttctgattcttcccttttccatctaactgcctttacttgttcgatgctaatgagaatactgtcacttaggaaataatatagcatgatctttcttggcccttggaatggctcccttggcatggtggtgtcatctcaggtcctggggctttccttccaggcctgatgtcttttcttgtcatttgttaaggttgggccctgtgttttggtgtatggcatgacatcaccttgtaaatccttctatcaatactttttatgactgaggtgggaacatttgtttctgcaccacttattcctccctctgtgtttttgcaggactctaagctgctgatgttgcagtgttgtggggtatctgacagcaccatagatcagggtgcggagccagagactagttgaccagaattagccatagagtacagggactgaggacaatggtcagagagatgcacaggggggaggaggaaggagtgacttacagatttgcagttctcttgaagagacattcccttgctgggtctctggccaaaaggaaggtcagctggttgcttcttggccttttgagcctatcaggttttcaccccaacatctgactcccaagcctttattagtagatagaatgatagagtcttggatttggcggcagggacagagctggtggggctgcagaaggtagttaaaatatcactagattcctgtatagctgctaagctgatggaaaaactacactacaggttacaacacttagcctgtgagcagcagataccttgtcacctgtgaggagccaactgtcatacctgctttcttctcaaactcagtgttgatcatggagctgagggtggccttaaactcctgatcttccttactctatcccccaagccctgggattacattcatatgccagcatgcctgcctcgtcaggtcttggatttgtgtttcttaatctgttctgccattatttaatgggtttagtctggatatgtctgactatttattctcctagttagctaaggttaaagctatgaagttaaatagcatctagcatccaatgaactatatttagatttttgcttgaaaatattttcttcccaatgttggggatcaaatcctgggttgtgcacacaggaggtaagtgctctcccactgagttgtatcttagcttctgaaaatgcttggagatccattccatgtttttttttctccttcctagttactcatcaagtttacaagttagtctgtttgaaagctactgtttctcatagctgcctctagtgtgtggtttcattgatgctcctgaacttatgcaggctttctgttacttctgttgatggcctttctcttacgtcagcactttgtgtgcatgccagacactcacaagtgcaaggctaggcttggcaatttaggaaggcattgccaccaaataaaaaataaaaagagggttgagactattgctcagtggtagatggcttgcctagcatgtgggaggcctcagttcatcctggaaaatgcaagtgtgtgcacatgcacttatgtgcacacacacacacacacacacacacacacacacacacacacagagagagagagagagagagagagagagagagagacgctcacacacacacacacacacacacagagacacacacgcacacgcacacgcacatacacgcacatacacgcacatacacgcacatacacgcacttagacacgaatgcatgcatgcacacatataccaggctttgttttgggccaccgaccagctcctaaatcatgacacagagacttattattagttttgaacgcttggcctttgtttagctcttattttaatctgtttctctttgtctttattttgcctcaggactcttcctcccctccccctccctctctcctcatactttcctgcttctctaggctgacaggctggtggctgcctggcttctggcctcagcatgtcccactcttcctccctcattctcttctctcttctgcccagacttttcttcctacttattctctctgcctgccagccccacctgtccctctctggccattgcggttgcccattaagttttggtttttttttttttttttgtaaattagcccaactagatgtcttaggcaaggtgaaacaaatgcaactcatctttccatgattaacaaatgcagcacaagcgggtgtaacacatctttccattaacaaaggcagtagaaacagaagtgaaacaccttcacatagtaaagcaatattccgcagcatacacacatctttgtctagttaaaataatattccccaacacgcacttacacacacatacacacacacacacacacacacacacagctccatggacaatttgaacaaccattagacaagggttggaaatgttttcagaggacatgatattgtctaacttggtaactgtaaagttctgggctccggagaccttgtattctgagctaatttttctcacttgcacttaggggttcactccatggctcctcagcctgaggtagaacacttggcgttgactgtgtgtccacttcatctcctagagttcagagcagcttcccacagtgaggagttttggggttgactcatgcgggcatccctccagtgataatgcccactggagtgagtgtccctgtggaactggcttcctgctccctggtctgtagatgaggagatgagggaaggtgaggtttctctgaggcacggattctcatctcattgatgtgctcactttcatcaggtttttctcattgtgaatccaagttccttacctagtgagcgaataataaagtaccccttgccttcttacatttgttccttggatcgttcaggaagaatatagtgtggtgtagtgggaagagcactgttgtgggagtcctatgtgcaggtgaaaacagcagctttgcaaatgatgtgtaagctgtgccaattactgcatcatttcaggcctgagttttccagttctgctgtgctgaggctgggttaggagaactctgagatcactctcatagtggcactatggtggcagtgagaggacatttaaaactgtagagaggagagcatgggtgactgtagaggagagcatggatgactgtggaggagagcatggatgactgtggaggagaacatggatgactgtagaggagagcatggatgactgtagaggagagcatggatgactgtagaggagagcatggatgactgtggaggagagcatggatgactgtggaggagagcatggatgactgtagaggagagcatggatgactgtagaggagagcatggatgactgtagaggagagcatgggtaactgtagaggagagcatgggtgactgtagaggagagcatggatgactgtagaggagagcatggatgactgtagaggagagcatggatgactgtagaggagagcatggatgactgtagaggagagcatggatgactgtagaggagagcatggatgactgtagaggagagcatggatagctgtagagaggagagcatggatagctgtagagaggagagcatggatgactgtagaggagagcatggatgactgtagaggagagcatggatgactgtagaggagagcatggatgactgtagaggagagcatggatgactgtagaggagagcatggatgactgtagaggagagcatggatgactgtagaggaaagcatggatgactgtagaggagagcatgggtaactgtagaggggagagcatgggtaactgtagagaggagagcatggatgactgtagaggggaaaggatagaaacgagacagggaataaggtatcagagataagagggtggaggaggacagaggccatagtggtggtggagcaaaggctgaaacttgaagatgtggctgtttgattttagtgaggaattaataagatggatgtgactatggccactagtgtgaaacatttcttaatcttagaaaacgtcttactgtctttttgtctagggaagaaaatcatcctaaagaagtaaaggcttattttactcaaggttttagtctgtggtcccttgtgtttgtgcccatggcagcatagtgtatttttggtgcaagtgtgtaagagctgtgtgtacctcctggtacctaggaagcagaggatggggagaaaggggatcccagacatcctaagaaggctttgcttcctcatactaggccacactttctggtaataccacaggctggcaaataagccattaatacttgggcttgataagatatgacagttctagattgtaactgaaattaatcgtttgttaacaaatgaaaattaactggggaggatttaaggcaatttgtttctttatatttccatcaaaatgaggttaccgccttaaaatttttaaaaaggatttcaaagaatttttaatcaacaacagtttccattgggtttcctgactcttccatataccaaatgcgacatgagctatgtatgctattgccaggaaacagtgtcagttgtgtggtggtgcagaggtttcagctcatagcctgaagtactttgcattaattctataagtacgcagagcagaatatcatttccaggaccctcttttccattgtgctggaaaagaggtagggcatctgtctgaagggacagtgctgcacaagtgtctccctttgtaacagctctagtgtgtgtgtgtgtgtgtgtgtgtgtgtgtgtgtgtgtgctcgtgtgtgctctcaagaattgttgttctgctccatttgtgtgtgtgtgtgtgtgtgtgtgtgtgtgtgtgtgtgtgtgtgtgtgtgtgctctcaagaattgttgttctgctccattttcccgagaccctgctttgcatggccatttcattggtgggaagaagcccctctgaattagctgccctctgcttgctcacaagagtgtttgtctgcataccatacaggcccttccatttctcaaggcagagagtggatgtggagagatggatgagagtcattttcatagcttaagcaatcacttcgtctctgggaagcaaacacagtctgtgatggatgcacttaggagggtatatccccggcatgagatttctttgtgtttacagcccatcacatctctttatggcacttctcatcacatgctctgtttttgtggattctggggagccttttagagggaaatttgccttcctgggatcttgttacagtggttgcatcaaccccacagaagaaaacaaagccttcatgactgagtgcaatgtgtaaggcatagacagtagttctggtattcctacagcacaactcttttgggttttggatgctttcttggttggggatgttctggctttagaaaaagatcttgtccctggataggctctattgagaggacagggtgattgtgacatgtgcttcttcaccctcccaatcccggaacatgcttagaccccagatttaggtttctaagagggaggtgggaactttttcagagtgaaaataaaaaccccattggctacatttttagacaatttcattttctttttttttccctcctgggtcccaagtgctggagttaaaggagtgtgacaccaccacctggcctctttggacaatattatagaacagacattattttgatatagttgaaaggaatcaaagctttacttggcccttcttcatgaattccaccagagatttcaccacttagcatgtgaaaaaacccttcacgggactagtccagcaacaaaggaaatggctcaggaagttggaattccttgttttgcaacccctgtgactctgagtgattgtgtgcaccccagaaaggcggtgggagttacagagtatcagcccgtgaggtacccagcctgcgactttgcaccagctttgccaactgtcaactgatcaggtttctctatcccactaccagttatcgggagtggggagaacaggagaacagtgtgcctaagaagacagtgtggtcataaagcttgaaagagtaccaatcccagacagctctttagaacagatatcaatggaaaaaaaaaaagccagttaggaatgaaaagcaatgggtgagaaactgtattaattatcagctaatgttattgtctgggtctatttttatcctcagtttatacaaagaaactataaaagactgaatgtggaaaaggtgtactgtccaaatatttagagatattaaggaggtactatttatatgtttaagtaattataattatagataacaagtcatatttaaatgataaatatggcttattgggatacggaatggtgcaacgtgggatttgcttaggtaaaggcctagttgtacagaatgtacatgacaaaacatcggctggtattatcaaagctggaagacaggcacgtgggggattccttctatgtgcataggattgaaatagtctgtcgggatacctcacagaggggactgtaggcagagatatgtgaatgttccagccgagggaaaacagatagaagggaacaagaatcctcggcagagatccttctgcgtggaatgttttggccacttgctggctcttgttattttaaattcatgcatgcatctgtctacttatccacggcactatttattttctgtatgatgctctacaacataagcagagtccgtggcgtgctggctcgtggtccttgagcatctgagctgtgtaggagtggcttccagactgggtgataaggttagagacggattcctcagcatggcacttctgctcttaacttcttttcagggtggctctacccacctacttgagctttgccttcctcttgaattatgcacttcctgagggtcatgggtgccacctacttggttctagaaggaccacgtctaattcctcactccgttcattcaagtggctgccaattaagcacctacctctaggttatggttgagatccctccccctccaccatttctttcaccttctgaactgttgttacactctggaagattttccaattactccatctaattagagggaagaataaattaccgaagcaagttaaattatcttgtgtgtcataacaataattaacattcaaataggaaattgctgccatttttataaacatcactaagtggaggcagcacccttgaaagcaggaagcatgggcatctccctccctgaggtctgccgtaaatgaggatgctttgcgcgagtttctgggcagtgcatgtgtgagagagactgaagccacccaagaacttttacgtttgatgtatccacctcggtctttctgcccgcacagccatatctccatgatgctctcccagtgtgatctcctggtgttgcgtttgcacctgtaaggagcgttacagagtgtacatatatcatcttatccagctattagactttctagccttgtatcattacatatagtattgagttggtcagctaaagactgtatgtcctttaaattacaaaggccctaaaaacaaataatacccaggctaaagctgcccctatccttgtttggtatgtggtgtgtgtgaagataaaactcagcagtttgggagtgagttggccatgatatgtatatgggattgggaatcttgcctgtttgtcccataaacaactccctcacctaggatttatttagacaactgacgagttaacactggctttcataatgcttatgatttctgttcttgttcatcttttaaatttatagacacttaagtgatacttgggttaagaatgttggaatctgatttaagtgatagcggttgagttgtaatttgctcgaatggagaaattgcccctaaactgcattagcagagtctttgaaggtttaaattaattttggggagatttgacttggatacaagcacagatcttgatatctcagaccaaataggagctctggtgtcttccgtaatcacacagcaggcctgagaagatgtcagctttctttttcttttcatccgtgtcagttaggcaagtttgtgccctgtttcctttaactcgggagcatgtagcttcgccatttaagggatttaggactggcggcatcattgacaaaaggctgagcaagcctttttcttggtgtttgaaaaatgcccctttcctgatggacagggcttgtgaattgcttctcatatgttgaagaaaatgctacccctccttttctttcttttttttttttttttttggctaaaaatgactccaattcaaaattattttttgttcttttctctttttgcaaagggcaccaaaagagccaaatatgaccctaaaatttattcctttctttggagctggacagcggtggagaagtggggctggtattgtcccctgaagcttatcagtgtggttgaatgagggtaattttgtcagctgacctccagccgggggcagggcactttctgagattaagcaacatgtaagatattaataattatttctagtttttggtcagaggttggcatggaacctggggaagtcaatcaaaaggaaggcaagagacgagggtgagatacaatgtatttttattcttagcttagaaaatgggttcccattactttgttgcttttgaatgaataaatgttctagatggattttgaaggaatgataacttctaaggtcaatgtaaatggctttctggagaatatattgaaaataagcaattcctttgaataaattacatattttaaagaaggattttattctgtaaaatacagtgtattgcatttggaatccccagctaattcacccacacctcatttacaatgttttaacgccctgcacaatgaatagttggtaattaggtgattgacactttctctcactcgacaatcacacatgcaagtaaatcgccccatgtgtaccaggagcattgcctggaaatgatgcaaaccttgtttggtaaatattgctcagcaaaactttaagaggatggaggacactgcgccttcacagctgactagccaggtgccctggaaatgcagtgccctttcctaggaagtaccttcagctctgagggtagtaggttcaagtccatgcaggctggtgtggttacataaagtgttttaattcttaggccatgaagaaatgttctcttcaggttatttctgttccgtacagatgatttataaaagaacatgccgttttgtttagtaaatgagtgattgccttctcattttcaacaagccagtgggattgtttgagcagtaaccttctctcaggattgccttttgttttatctcaggtataagtaaaaaaaaaaaaaaattgtcacattatcatagcctgcgattttaaaacttacatgattatgtaataccattgcaaagtgtttcatagtatatattatattttataaggtaatactaaactataattataatgaaattgatgtttatgtttatatactaatatactttctacatatggcataattcttaagattttctcagtagttttataataagtgataaatgattttcaagcaatatataggtttaagtatggtgatttatggagatttggagatacagttgtggacattcctgtattctacactatcactagcatggaatggacattttagacattcctaattctaaaagtagcaaagttctactgtctagtgaggaaagatatcattccattttatcaggtaaaagaatggtagagaaaggcaaatctaattcataataattgttcagaatctactcttgtgtttttagttactacaataggttcactattagtaaacaaataattacagcccatttataggtggtgacatcacccagccatgtaataggaggtgatccaagatgttgcaatttaaagagaaggttaggcagtgagtcaggccagctaaaagtaaagagatgaggactttcattctctttatcaggtgtgcagaattcaagataaaaaaataaatgaaacaatttttttatctgtcctaagaatccccctttccaattatttttgaaacatttactaaaactgcttcttggggagatatagatatcatatgtaaattaagaaattaactattggactggagtggaaattaaaatggttttaaaattcatagaaaacaaagttctactcagggatttatagtctgaacatattcttgagctttgaaaccatagaaaaatattttcctgtttgcaagagaaagattgaacagttgtttggaaaatatcatgtatattggatataaaatatatgcaaaatgcactttgcacataaaaaaagtcttgaaagaaatagagcctacaaagaaatccccacccctctcagaagtattgacgataaccagtaggcatcctgtgcgttaaggctacccttatagcatggcggggtttccaaagcatgcttttgggcgtctttattatttttactgttcatttagaaggatgaatcttcaagatcgtgtaatagaccctctccaaaggaaataccttagcctgtaaatatatgaggaaaggatttactctcacaatagtcaaagaaagacaaatgttgagagaccattttggaattaaaaaataaaaaaaaaaaaggatgagctatcaatactcaaatgttagcaagacctaaaactggttcacatactggctgttgattttgggacagagaaaatttgagaactatttatcaacagttaaaaatgactaattgaaagtgaactttgagccttgtgtggtggcgcacctttaatcccagcactcgggaggcagaggcagtcagatgtctctgagttggaggccaacttggtctactgagtgagttccaggactgccagcactattacaacagagaaactctgccttgaaaactgcccctccctaagaaaaggaaataaaaggaagtgaatgttgtttgatatacttgtacctctctccacacagtatttttagacactgtgtcattattatgtagccgtggctgttctagaactgcatatgttagaccagactggtgttgaactcacagagatctacctgcctctgtcccttcaatgctggaattaaaggcatgtgtcaccatgctctgcttaattatactttttttagcagccaaaaaaaaaaatgttcagcaatatgtaagtgatgaaatagtaatgaaatgaattataagcaaattgaaacagaaattttgcagtgaaataacaagggtattatattacttgaatattatttgaataacaatagttgatatgtatatatatgctaatataaaacacatgtacatcatatctaagtagacatttgtggagaatagaacacaattatcaccttaaattccttattttaggatactgccaaatatattgtttaattttattttttgtcagtacacaaaattttttaaagtcatattttataatatgttttttctcttttatgttactatatggttttattgattttgtgtaatgtttgtaaaacagaagcagtgctcaggatcaaatcacaagaaatttctacttattgtatatacttgaaaaatgaaattattttcacttaaattgggaacacatgtataacaatgtgagtaagctgtctatatattcacgttgtgatttttgaaacattttgtagctttatatcttcacatgttagacatcattgtaagttacactgattcaattaacattcaccacataatcatgagattgtctagtcatacatcattacacgtaaaggtcttttggctcacagaggtaactagctgtcaggtaagatctctcagcgactgagttccggaatgaacctgagcagttagggttcatagcacaaccttccagtcctcacacagttagcgtcatggttttcattttattttgttaaaggagtatgtgcagcagggattatcacagagccttgtgtaataataccttaaaaacaactgtgaagccaaaggcagagggccttagtaggcatttccccaaatgtatgctcagctggccaccaaacacatcagaggatgctccaaagcaatcatcaccaaggaagcaccaggcataaaacggtgagatgcactgcacattcatcaggacagatatacataggaaaacggaagataagtgttggcaaggttgtagagaaatcagaatcctggtatgttgttgatgatagtgtaaaataggtcagtgtgaaatagacccgtctaagatcaaagatcttagaattgcagtatggcccagacattccactgccccatatctaccccatagaacccactgccacttcaaatgcaggtatgtgtatgtttgtagtgaaactcctcataatggccagtgaccccagtatgatatgtccatacaatggaaaacttcaggtatacaaaaaaaaaaaaaaatgaagcacagctcatgctacaacatagatgaaccttgaatacattgtggtaactaaaaagaagccaggagaagaggtcttgttgcctgggtccacttatatgcgatgtctacacggataaatccatagcgaatggaggagtcgccagggctgttatgagtgaagggtggggaataaatgacggagcacagagctcctaactggggtagtgaaaacattttagagccagatagcatggtggccatacaacgttgtgagtgtaccaactgcaactcagtttttcatcaaaatgattaatctaatgtatgcatttcacctcagttaaaccagatagattaactacattattctgtgttaagtagcccatcattacaagcttttaaaaagagtatatagtcattcacatgttctctggcaaatagcaagttaggcaaatacaatcattagccaatcattttgagtgtttaacatgttcagggatccatgattgacaggatctccagactctggggactatccgactgcaagaattaacaaagtacagacagagtatggaggctctattgactgaatagacagtcagtaaataggaggctttcatgtgagccagcccaggggttaattgccttttcacacagtgagtagtcagaggggaagtaccagacttgcatgcacgttcaggcagggtgacagcgtccttctcccagttcaggaacgtttcagtcatgcatactggcacggatcgttcaggtgacagcatgcttctgaaaactctctgtgcaaacatgctcctttcttcttcagaggtgtgccaggaccacatcagcttatggcctgtgtggcctctgcagatgactctcagctcagaacagctttgatggtctcggattcttgtccaggtttcccaagaagaggcttttaggtgtccacatcactcttgcccactgcatccctggggagctgcaagaaaacagtattttctttcaaaagggaaaactagggacagagcggtgaaaaggattccctgagattaggtcactgggacacgagtcacggcagcactgcctgtccatcctgcctcacctcagctctgtacacatgtagataatgtttacctacagagtcgtctaagtcaccgaggcctgtggagtcagcagtgtctgtatttctggcctttccttccctgttttggaatgaaacatagaagggtaagcttaacaacatgtgagtcattgtattgacgacggatttttttcttatgtggcagagggttggtgctgaggatggaacttaggaccctgtgtgttccatttgttattttgtaagtaaacttaacaatcaaacctgctgccttctctcttttctgacacttgcccacatcgccagctactttaaccagccccacctgagaagcctatggagagtgccgtggaggcctgctgtttctgctgcatcttgcctgacaatatctcaggccctgagaatgtttttggcttgagggtgtggggtatgttctttcagctcctaactcaaagtctctaccaggaccttcttttttctgtcccacagaccccagtgacaaaggcacatgctctgtgctctgtctttgtactagataccttcttcttcttcttcttcttcttcttcttcttcttcttcttcttcttcttcttcttcttcttcttcttcttcttcttcttcttcttttattgtcatggactgtgtgtcacaagttacatgttctctctgtctgtctctgtctctgtctctctgtctgtttctcctagtctcctgtctttgttgcttaattttctcattgctttgataaaatgttgaacaaaaggaagataagagaggaagggattatttggctcacagtctgagggagcagtccatcataacatggaatgcatggcaacaggcctggaacagcttctcttttgcatctgcatccaggaagggggggtggggtgtaacctggtgatgctcctcctgccttctgctttttgagttagtctggatcctcaggacaagggaagatgctaaaaactccctcacagacactcagaggtttatctcctaggagattctaggtcctgtcaaggggacatttaattcttaaagtctcttctgtcttttgaaagtaggaagggaggcaggaggagggatgtcgtctctacctctctgtctttggctcccagttatagtctgaattgtcttcactccttctagtttcttttcacttgctgtgataacactctgaccatgaacaacttaggggggaggaaaggatttatttgacttgtacttctgggtcacagcccatcattgaggaaagttagaccaggagctcaagcaggaacttgttgtggaaacatttagggacactgactgctgctcactcacaggctcacccttggctggtcttatacagccctggctcatctccctaggcagtggtgccacccacagtgggccagaccctcaataatcaagccagtctgatctggacagtccctcaaaggagactccctcctctggtgaccctaggcaagttgacattcatagtttttactgccttctctctcaccacgtcctcttccactctaaagctcaagacatcctgagctctttgctgctcttctggagcactctcagcagtgcacaggaacctcatagcacccagggtgggtatttcttctgtcttattgtctgctgccctgcttctcttttaattgcacttaaaggagtgacagcagctaaatttatttatcaagatgcttacacgttccctcttaaagagcatctagattaataaacatcaagcatagaaacctaatctgaatttgtgtttttattgagagcactctaattaaacacagccttcaaaaaataatcaagtaggccctatgtgtcctgcaacatctgatcagcctcccatcccaggaagccaggtcctcactgccttcatttccaagttcagggccatctaggtagtggagattaaaatggccttctcatgaatatgcataagcctataaagtacatatatgaattggttaaagagcaataaaatttctttctgcttccggagtgcttagccgggctattaagatgtgaacatattgtcttattacaggagctgcagctttgctacttgatgtgcctaattattttcaaggtcatttccttctacagaaaccaaggcaagctggaaaatgtcaagtagcctggacatgtgggatgaagtcctgttcttattgtcattttttcatcacacagagttgccgttttgagtctcctagttacagccagtcatcggacacaaaagtcacagtaatttgcaatgttcataacatgacatcctttatctttccaaccattaggtgttccaaggatcttttcaaaagaaataattgccaaaagttattgagtatgactatttacaacttcatgtgacactactgatgaaagtgactaactgcaatagatagctacaataaatagatgaatataattgagacatacagctgaagaggattatgtacttagccccttggccacttaggatatgtgttaaataagctggctgtaagaacattcagctgaaaatagtttttctgtacacaaagcaaatctctatccaggcaacacactctgagctgctcactgggcaggaatatggtttacagttcatacatcctgtaagaggtctgctgcgtagcaatccgtatacgtctggacaacatcgaacttcaatgtgcttgaaggttttaggtagttcttagcagtgcatcaaaaagagatctgatctacactgctgtctcactcctgtaataccagtaattaggaggctgaggcaggaggattattgcaagttcaggtcagcctgggctatagagtgagtcttatagattgatatcctgtctcaacacacacacacacaccaccacccaccaccagttctccaaggacagacctcagatttcagaattttgcctccaccagccataggaaatgctagttattctgtatagtcccccaaatccaggaactctcttcattgggaaatttagattcagaggtaagaggaactcaatctctagatccttttaatcagttgataaaaattgaaaaccatccaacaaaacacatacccactctgttagttttattagaattgatttgagtgtccatggagagttagggtcagttagctataggcctctgaaatccttctccgtggggttccagcctaggctgtccccgaggcagattctgtttgtcactgttggacagaactgcactcctccagggagcttgttcttggtagcgtgttctgcctgctcttcggtttttctaaagataaggatggtgcttcgccagtgtggaggcaggtgctggctctttgattggatctcttgcccactctttaactttagatgtcttgttcccatagactcggcttctctggtgatcccccgacaggcttactggggaatgaattcaacctgagcagccaagctacctctgtgcctgtttggaatgtagcatcgtgaaaacaggtgcaatgtgggagagaagacatttgaagaggagggcgtgttggtgtgaaggaggaggggagtgaaggccaggctgcaggtgtcctgatcaactgttggcactgatgggacttgtgacagcagcacagggtgaccctggactctaggcagacacagttgaaagaatttgcagttcacattgaaagccataagcagaggcttttgtgtcctgtccagtcctgcagctgcttccaaataatcgctcagagacttaatattaattacaaactgtttggcctattgctcaggcttattactaactagctcttacaacttaattaaacccatttctattaatttatacattgccacatggcccatggtttaccagttctctgacatcttgtcccttgggtggctggatctcatctctggatttgccacccagctttatcctgccttgccataggccaaatcagctattttattaaccaacggggataaaacatagtcaccgcagaaacaagagttatcccacagcaggaagccactgggcagagaaaacaagcctttttaacagcaatgaaaatagcctgctgctggtagtggggtgcagttggactccccgctgtgcatctccacaggcagtgggctctgctcttacctgcagggagtgactggtgctgcacagagatgatgtgagagagtgaagtctaccttaagcaagtctacccaactgggtctgtgacctccgcataggtagcagattgtcttggctaagaagagtaagcggagagcccgctttccctcccctagaacttggtaggtcccctgctccaattccagagccctgagggacccttcacatttatcttcctttaatctcccccagactttaagtgttggtttgtcctggctgtgatctgagaacactgccctctgctccttcccaagagtcacctgcatgcagtctgctgcttttttctccagtgtgagcactcgtgacaagttctgtgtcagggatttggtgacagtgttggggataatgtcctgtgaggttctgagccgctgtctgcatagcttttcttccttatccaccttcacagagctctttattctgggaaactcagctacctcccttcataatgcacagcaatttacctctcaagcatcctcaggctgtgcgcccacctccgcagattccacagctcattcctgcttcagcgtggggagctggcgagagctttgagatctcggccttctcttttccctctccctctgaatccgagtgatatttatttccaaccgacacacattttcacattcccagcctcagctgcaggaaaaggttcattcagttttaattttatactttttcctctcatactgtcaggtggttaaagtgacacatagaagtctctctgtcagaatttccaaatcagtgacactcttaggcaatgaagaagagggagagtgagtaggatggtagacaacacccaaaaggaggctggcaaatccctctaactggctggtgtgagcaggacagaggacggaagctacaagcatgaacttggtgaccagatctccatattctgtctcctgtcattcctaattttgtaaatttaagtgagtcgcagcaaacgagaatggatccaccatgtagtcctcaggcacccttcgggagtacaaggtggtggggcgctgcttgcccccccccccatgtggcggtcaagtcttgattttggtcaaggaagaagaaggaggaggaggaggaggaagaggaggaggaagaagaagaaggaagaagaagaagaagaagaaagaaagaaagaaagaaagaaagaaagaaagaaagaaagaaagaagaaagtagtcatcctgggagatcgtactgtgcagagttttgatctgaggccccactgtgggtgatttcagagggcaagtgccgatgtccatttgtcaaacagttacagggctctaagatcaagttcccacttcctcaccatgggttgtggcgccagcacaagccacagcttcaccaccaagaggcctaacacctgctcctagaccgactgaataaaactccagtgtcctgcagaaaaaagaaaaattaagtgagtcacttaacctagagcttgtctcttatttgtgaaataagagcaataaacacgaaggggtgtgaggagacttaaataagctggtatgtaacaagtgttcttgtgtttcctacaggaggcactgaccttcactcctgtggtagtttttccctgttaccgttcctgtaatgtgcttcctgtgttctgcacacttcagctatcttagttaaggtttctattgctgtggaaagacaccatgaccatgcatgacaactcttataaaggaaaacatttaattggggctggcttacagtttcagaggtttagtccattatcatcatggtggggagcaggcagacatggtgctccagaaggagctgagagttcttacatcttgactcacaggcaacaggaagtgatctgagatcctgggcatgtcttgaacatatatgagatatcaaagcccacttccacaattagacacttcttccaactagaccacacccattccaacaaggccactcctcctaatagtgccactccctttgggggccattttctttgaaaccgccacaccagcacaagccttttgtcacaccaggaactttatcaactgccttgcccagggcatttccatagaccctgttcctctactgtcaactcatgctttcttcctagtcaataacatagatgtttttgtttgtttattttaaatagacctaactcaattcaaatcaggaaactttctgttatagtttggatcctaaatgttctccataggcccacaggttacagccttgattcccagcatggggctctattgggaggtaaaggatctgttacctatgggtcctgctggaagtctttgggctactagggtcgtttccttgagtgactgatgggtctcagtctctagcgtacttaccccactgtgtactcctgccatgacatttcatcccagccccagagcaagcaataggaccaattgattcagaaccagaacttcaaacattttcatcttacaaattgattgttgcagatgctgcttcacaaacttcactgtagctgaggacaatgtttaagtagatgtcagtggtggtcctggcttctggaacagctgctgtttgctgatctgaacgactcacaggactggctggggctctttcccttccatctgtctctccgaaatgaccaggcacacctagggagctgaaggtacaacagaaagatggaagccacacctactggtggcaaagagaaaataccaatgcatttgcatccctgctgatgttgcagagcccccccgtgagataaagattcctatatttgtgacaggcatttcatctggtgttctgttgtaagcagtggaatttaattctgcttacacatgcttctccaaagtttctttagctgtttttattatttaatttttaatgattggctcctcatcattcaggcagtcatgatttggacatacttctcagaaagggctgctgtggctgccccttcccaggcagctctgtcttccatgccctgtggcctttctcttgttttgtcactaccttgtgacctcatcttattgactttttgcccctgtgtgtgctgctctggaggctcaagttcccttgggatcaggtccccgtgtgtcttgctcactccatcctagatggtgagttagagccgatataaagcagatgctcaataaatacttttcaactcaataaaggccaattgtatagattaaaggtaaagttttccaagttagggttttgccagagatagaaagatatgtgaaattcatggtgctgggctaaggcaccaatatatagtctgtgcatatatatatatatatataggtgtgtgtgtgtgtgtgtgtgtgtgtgtgtgtgtgtgtgtgtgtgaattcagtgtgccaagaattctatgtaccttcatcgtcatagtttcagtgattaacttgtattagaaaaaaacaagtgtaaggcctggggtggagtccagtgataggccatgcacaaggccctaaatgtagtccctcctactacaaaaacaaaatccataaaatcctgcaccttcttcctgctttactggcttattctaaaataaacccaacttccttggttaatcagtgtgtatttatttatttatttgtttgtttagtgttttgagactggggcctcatgtagtccaagctggtcttaccctctctaggtagccaaggatgactttgaactcctgattttcttgcctccatctagtaaggactgggattgcaggcactagaaatcatgcctggttctgttttgtttatcttagggtgctgttcaagtgaagcctgaaacgtgtggtacgctttcaaatataactgcatctagtctcactagaaacttcctgtcacacatcttagtggctccccgtcaaaacgtgcgatttcacgtgtcaaggtggctttctttcctgactggctatttcaaaggatggcattgcctagatgaaattctgccgtctgatgcatcagttgcaagacacagggctgtttcattttcaccagcgatggagaaagagtctggagaataacaagtcgatttttaccacatagaaatagcatttgggaaaagaatcttcattgagaagtcagccattcctctcacagcagaccatatctgggtttaataatttattctgaaacctgtgctttttgtggccaatgtttctggctctttacttatttagaggcctgtgtccctcttggtttgcacctgcaactgccccttctgtgtgctgtgcacaggcagttgggaataacacattcgctggatggaatcatttcagcccctcagcttcccccaaatcttcaatctgttgggatttggctcgcaagatatatttttcagtaagctcatcttttatctgaaccatggttccagatgtgtaaacgcaggaacctggattgaggtgctgtgattcttgagaaattcaaaaccctacaatacattgcctggtttgctgtttttcaactctgcaagtctcttgtgtatctgacccgaacagtggaataccaaaaacaaagcaaaaatccccaatgcaaaaacaggccacaagggcccatgagaaggcaataaggctgcctgctttggcaagggagaggagagatgtctttcctttggggctacttgtgaccccatcgtggatatagaggactcctagtattaaaagctgccttttgcttctgacagagaacatgattaacagaaacaagctgagaagaaatgtatgttagcatgattccttgatctacacaccatgtctgactgaatgaaagcctgacttcataagaaacactaattgctgtgctcccccaatccatctgcctgtctgtctgtctgtctatgtctcactcacttactcactcactcactcactcactcactcactcatgaaagtgcttgtataggcatatgtaccatgcatgcaaatttgcatgcttacagaggccaggccagatgttgacatcaggtgtcttcttcagctgctctatgttttgagtctctcactgaacctggagctcatctgtttggctagctgcctggccagtgagctgcaaggatcctgtgggcctctgccctcccctgtccacattctggggttgcagatatactgcacacctagccttttatgtgtgtcctgggatgcagactgaggccaataaaacttacaagtcatagtgaaaaaacggaagaggtttgttccatgtggccacactgggaagaagaacagataagaagatctggtgaaccctgaagtccatctctgaggttctgatgtgagattctgggtagaaagtaagagttatgaatagagaaagtaatagttatgtatggtctggcctgtcattgaactctcattatcttcactctggtctgtccttcaaggtggtctgacaagttgttagaactgtttaaaatgtctacttgggtggcaaattcctcctctcacctgcaccaagctcctgcattctcctcccagcattagattctagggaaacaccagcatcttggggaccattatttagtggtctgacagccatggggtggctgtctggatccttaagagcatcttccatcctgccaggaaagttccagtggttgttagcatttagcacagtaagtggtgaaaattacaccataaagggaatgagtattcttctcagctataaatttgatggtcaagctacttggtttgattgattccttgttttgttattgtggaacataattccttgatctgcttaggattatgtttttctttaatcaaactcatagacacaggtaaaattttgaagacttgagccctaatgactatacaagtgagccagtcgttcactggagacgcagggagtcctccctcttagaagtctgatccttttatgccacacctgccaaagaagctgttgccttattaagagggactgtggagttctaacgttagcagggatagaatcagtgtggtgcctagtgaaggccctagggccaccaaggctctgctttcttctggtgattcatgcatgggcacatgctggagaccttgtcatgcttggctgtgaagatgtacagccaggcaaatgtattattctttgccctattgtgaacttgctgtgtagcacagtcttaggagttggagaagagtgagtgattcatgtatgagtgtgtaagcagagggggtgaaagcgtcatatgttccttgtaccttcgtgctctttagaaaatggtggtatggatttactgctcaattgtgtcacagtatgtgctataaatagtgaggaatttgggaaatagggatgacagcgagcatatactccatgtgctctggtgcacactggagtgtgacaaatttattaaaatgttttggcctttggtttccccagtgacactcactgcctggctgactccttcaggcagctgctatgctcatggacgggccacctgggacaactgaacagcaacttaagtgggttgtaacggtgtatcaatactgaccaaattttgaagagtcacttcagctctaaaaggacttggcagccatgggggacaaggactcactccttagcaatctagggaactttaaacttcgtttttggtagtgatctaagatgttaagaagacaccactccatgggttattcttaagcctttatcagatggctgtgttcctttgtatagttaacaatagagttatattatttaacttccaggtggaaatgtacctcatttacgagacctagttacaaaaaggagtgagctgttccttttccagaggtaaatcagaacaagagcatcaacccactgcagacagtgagttgaagaagaaattggaggaatgagaacttgcctcacgggtcactcatgatggaaaggcaagattcacgattcagttgctcagatgattgtattctttttggaatgtatattgcactctgttacttgggtgtaggatattttgtcagattggtgttctgtatctgagaatggattctctctgaggtttccatcagggggcaggggttgatcatggtgtaatcatattgtgataccaagaagattctggagcgatttgtagtgagtggctttaatcacaaacctgtagactgctgaactgaactcccctcccaagcttaattgtaactacttgctgtgcccttggggaatgaaagccatcccaggattggggacctccagggatttgttgttgttttttgttaatatgttaatatgttacaagcgagcaatagttaaaaaaagaagtcaagtgtgaggtgtgagcattggggcagagtggaggcaagttaatggctgggcagtgtggtgtctgaggaagggtggcagtcactttgcttcactgagataccaagctcagaagtaaacgtgtgttctgtcgcacattacctagaatctcagcgagtcaggagcagagtttccttatagctatagaggcaaaaccacaggtgatggggcccattgtccaccaagggcaaacgatggattcaccgtttccttaggcttcagagtaaaggcagaggcagctgggtgggattggaggcagaaagcagttaacagagcttcatgcccgtaccttccagttataatcctgattcctatttggagacgtctaagatttacagttcgttacaatgctgtgtacacttggcatactttggtttttttgtctgatgtagtggaagaaaccctgaacagtagtttttaaaagtgtgattacatcggattaggacaatgggcatattgctcatctcgataatgcttctagcttttgaattcattaaaataataaaagattttctttttctgcctcattatttttaatgtaattctcccatagagcagacttaatccctttgttagtgaaagtagttaacacttcctttctgagaggaaaacaaaaatcactctgtgtggctgtgacggcttcctctgagggaaaaccaaacaaaagcaaaactgagtattggccatgaggagttacatgggctgggggaggatgctgatggggtaggtggagaagggctcctggatatcagctccagaaaccctaaccacaaacctataaatatatttgtttttttgtttgtttgttttgttttgctttgttttgttttgaaccctgtagaaaatgaagggttcagtttggtttcaaggttccttttactgctcatttaaaaatcatttaatggcaggtaatattttcaaagtcccattgtgcccactgctcacagctcctgaccttgtgtctttcaagggcagtgtctgcagcctgtggccagtcttcccattttcttaaagctcactcacttcctcaattgtcctctgttaaggtagcagcattgttaaacctcagtgtcatcttggaattcagctgtgttttccaaataccacctaaggtctggtgtctctctgcgactgttttgaacaataaactcatcctgtggctgtgctgtagcaaccctgtcctttctgtgctgtcctggtcctggtcctggtagcaccattgtgacagacagatctcaccttatgtgaaagaagggctcagcctaggaagtctctcggaggagtggctagagtgggaattgcatttttttttttcaatttggaagtcactaaatcatagttttcagagtaccccagttagctgattaaagtagcaggcctctgtgcctgtaagatttcctccattttcttccatccatctttgcttggtaatttttctctgtaaataggagtttggaattgtgagcgcacagcacgtcccgattcccattactttcaggagttaacgaaggtgtattcttcatggagctcgtgcccagcttctctcccatctctgacactgagagctggtccccgggctattcctggagctcgtgacaggaaccctctgagacagggcctttctccagcaaataaattactgttcctgaatgcaggcctttgctcagcctgggaattgaagagagcaacaacctgtccttttcctgggggggtagctcaggctgaatctgtttacaatgagaggtgtgccaggcagctccagtgtcaacctgactggggaacccacgggttctggtgggaggaaaatcaacagtgtgagcacacctggtgtgtgtaaggaggtctctgctaactcatgaacagattatcttctccttggtgccaccaggcctagtacaattaacaagaaaacagcctgatctgtccccaagagccacacagaatgctgtgcagacccctcaaaagtttgtgtcagggattatgtggacagcaccattggccttctgtgaatgaggaaggagcagcccgaagtggtctggaggctttacgttgccccccccccctcacgcgcacacacacacacacacacacacacacacacacacacacacacacacacacacaccactcaacttgtgacagggaagggggtaggaaggagcctgtttgtcatgcccttgaccttacagttatttgctctcttctgatcagactacacacatatttttccttttggatccagactctcatactcaagtgtctgagcttctggatgtgtctcagtcactgacctctagctgtgaagagacaccatgaccacagcaacccttagaaaacatttaattggggctggcttacagtttcagaagtttggtccgttatcatcatgcaagggaccatggcagcaggtatgcaggcatggtgctggaaaagtagttaacggctgcatctgatctacagggtgtgtgtgtgtgtgtgtgtgtgtgtgtgtgtgtgtgtgtgtgtgtgtgtgtgtgtgtgtggtgtgtgtgtgtgtgtgtgtgtgtgtgtgtgtatgtatgtatgtacgtatgtatgtatgtatgtatgtgtgagactgggcctggaatggatttttgaaacctcgaagtccacccccaacaaggccacacccccaatccttctaatcctttcaaagagctccattctctggtgactaggcattcaaatatatatgagcctgtgggggccatttttttttctttttttctttttctttttttttttttttttttttttttttttggtttttcaagacagggtttctctgtgtagctttggagcctatcctggcacttgctctggagaccaggctggcctctgccttctgagtgctgggattaaaggcgtgtgccaccaacgcctggctgtgggggccattcttattcaaaccagcacaataattctgaaagttttggttttaagagaaaaattgaagcataagctaataaaactgggacaggatttagctttaagtccggtgaagctcaggcactgggtgcttctaattctccaaacagtggcacagaattatttactttgttgtcaacagctcagtgaatgtattaactgagttcaacatgaactaattttgagaatgctagctgctatgcattgagccgctaaacacttgacatccatggcagacaacctttcaaacgaggtgttagtatcactgctttcatttcacaaataagaacccagagctccagaagctgaagaactcagcccttgcacattgtaaccatggcaacagagccgagactgaaattctgatgtcagttctaagcccacatccttccctcaatgaacagaatgacactgagtcacagagcccaggacaccagttgacccatgatgtttccactgtcatctccttaccccagggagccttgggagaaagagaggcaggcacccagagttcctctacatccacccagtccagttcctaaacattatgtgtgggtcaaagactgaaaatattatcatagcttgagcaatccccttagtgctatttctgtttaaaaacagttacagagtgcctggcatttgatgacaaggggtctgcttaaagtcttgttgtttgtttttgtttttgcaatttgcagttccatggacattgtttcctaaaagaaattgaatgcgaagcaacttttcaggagttattgttcatgtagcagacacatatacaatctctctctctctctctctctctctctctctctctctctttctctctctctctctctttctctctctctctctctctcttctctctctctctctctctctctctctctctttctctctctctttttctctctctttctctctctctctcctctctctctctctctctctctctctctctctctctctttcataattgcctcctagagctaaagtctcacctccttttcaggtagatgaagtatatatttgatcctctggccatacaaattacattttaaatcattaccacatctctcatcatgtctgcaggcagagtctcactctgcttcagagcctgagctctactcccaagtgctcctcccaagtattggggctgtagatgaacagtcctgcaccaggggttttcaccatgtgtttaagaagtagctccttcccctccagcctacatcaccgtgtggtgctcctatatggtggatgcagtccacacttggcatttcttgcagtccctggctgagggttcatgcttccagtataagtcatatctgtaacatgtaaggggaaattccatatcccttaattttcaggtaaatgcaacagtgaccatgttcgaatgctttgtatgtttctatgagtgtcagcagttttccagaggtcttgtttatgaaggctgttagttatgcaaagtgggcctttatggatagttctatgaaatgattccaattaaaaagaaatgggtagattgctagtcagtgtcagctaattaaattatgatgtgctccagtcattaacaagagccttgactaaagagagagagggagagagagaaaaaaaaaggataaaagcagattcttggaatttgttgatagggagggtatatggctttatccattcttatataattagatgtgtaaaacaacagcttcctattacgtatttgaaatcagaagtcttattactcccttctagggtataattaatcaatttctgctggagtgttttagatgctacagtgaaatgcagtttcattaagaaccatagtttaataataatgggtcaatcaacatgacactattgcagacgcaaaaatgagcttcagacaccaaaaccatgttcttgctgagacaagaacattgccccgagaagaaattgaattgagaaggcggctgctcctgaaggctgcttccgcctcagcattttgctgggaaaacgagagggattttagaccacaggcctgcattgagggtactgcagcatttctaatctgtatccagtgatcatcaccccagggatgctgtggctggagtgagcagagccttgctgggtgacagtaagtagtttataaggacagttggggaatggagggtgcttctggaagcatttcgttaaccatgctgctgcctgtgaggaagagtacaaggctcttcactggattaaatcagtctttcaattctgtaagccagtgcccctttgtgtggtatgaggcaggatgttttcctcacatgtagataagtgatgtcttgtcaggtgggagacccaggagcacagtggcctggaagagcttggggttcctcaaacataatgaaaatcttgagaatttatactcagctagttggacatctatgatgagtcttaggctgctgtgatttcttcattctcctaatgtgctatggaatgaatttggaatgccatggaatatcaatgcttacaaggcagatgtgaaaacttactgtggaaggcttctgggatgttataagtcatgcagttttatatgacttgatcacagctcccatttgaagcatttccatagaacttctatcctccttccagaagccaccagaggtcggaactaagaccactaccaggctccttgttttcactcttaatcttcctttctggacagttgtgtttgtttatgtccagaaaatagagaaatacctagaggaatcttcagggagaataggtttcttttgatgactccctgtcacagaggcactgaaagaaggctgagtgtccttggtgctggggacaagatggctctgtctcagtggtaaaggagcatgagtgtgttgcgcttaggtttgaagcctgccctgcttgcttgttcccagctgcgctccctgagcagttttatcttacttaaatgtaatttcttaaatgaaaaccaaaatgtgggggatacattgaaaatgtgcaagaatgtaactaagcattcctttgcttctgtctaggaaacctactttcttatcaaagtaagagtgttgcttcaatctgaactctgcctccactgtgtgtgcaacccaaaaaccaggtcttaactaggagctggcattttattctaatactaagcccacaatatatgctaagtgtaaattttgaataatttaattttactctagtggttaaacattctgtgtatttacattgccatgctagtcatttattttaaaattgtgggtattttcaggaggtttatgactgtgtaaaggggtttgccactttctatcaaaatatgcatttaacagtgcttatttcattgttattctttgtgtgtgtgtgtgtgtatgatatatgtatgagcatggtgcacacttgtcattgtgctcttgtggaagtcacaggacaacttttaggaggcgggtctttcctttcattcaggttggtagcagtagcctatcaacttcccagatacttacgcatataaaattcaaattttgtcaaatctttggcagttactagtattgaataattacagtgtggggaactggaggagagcattaaattccaagccagttatgtttagattcaagatatattaggttcatgtgatactgggtattcggtatactatcaacctgtctgagagatttcattttcctgaaaacagctgcctttaagaaatgcacaggaattgaatacaccaggccacccaaagctgtcccagcttggtcctctcatctctgtttgtcacaagtgatagaacatgataactgttgaccttaatgatggtcctaaattgccagggaagatactttccaccctgttaagccaggcacccagatgtgcagttacaaagtatccctccaaatggactgatagcaatgccttggtgcttcgtggtctaagctttagttaacaacaacagtcctcatcaccaccaccaccaccattatcatcatcattatcatcacctatggagatggtcacccactggaatggaacacaacacttggttgctgtcacttctcaggtctctgttgtatggctgtgatgactgatggtagtccagtcagcagtagtattattaccatctagtgttttgttaagtgtatcttgcttgctagaaagtacatcatcttttccataaggttatataaaccctttcttaacctgataaacaagcctgcttccatcttgggcttaaaagccattttacaataaaatcaaactagttttattcctgtttatgattaaatctgttttctcaaggactgggctatgccctatctgtggccttaactatacatggttctgtattgcctgttccaggaaacaataaccgtgtctttgtttcacaaagttgttatgaccagcttgcaaccatgcctttgttttaggaagttgttacgaccaacttgttatatttatgttctgctcctgtaaccctgattatctacttgacagatcccccatgtggaaacaccctactcctgagctataaaaaccttatattccccaagtccatttctgatctcttgaatcccacctgagggagaaacacaaataaagcttgttttaattaatttggccataatttagggtggtgatctttctgcatctgtgggattaaccccacagaacaagtctgggtcccattagcccttagggaaaggtccttgaagaagactatatatgcccaaagaagtagagctggagttcagagagacagtgtcctttctctttcctgtatgactcaatgttcactaaggatctgactcttcttcctccttggctgctattgtgcatatcttattttgtatgtatgtgtgtgttattcagttgacctgtttaaaaaggagataatgtctttaagtattattgtattttaatttatacagttttatgatcaggcaaataaataatgaaagtggtatcaggacaaaatgcacgcaagagcctttcgttgactacaggcaactcttgcggatcttggtagagagggttatcccagacatctctcaagccaaggcctgatgtcctttaattccctgcaagattctcagttgattcttccctgcaacaaattcttttgactgtcagcttgaacaacataaacactgaggataaaaacccacattcagggactccacagccctctgttaccattcttgactttctttgttgcatcttcacagatcaagagtttcacactcaaagacgaagaatcacaaaatcaaactgtattgtttttatttaacaaacctctctcagaatcagtcatgttcttgcctatgacccccagtttgaatgttttgctaagaacagagaaagggacttacaagaaggggagaaactgtggacagagtgctctagaatcctccctgaaataaagggaattaattgctagtggagaaatgaagtgaaggtgtcatttaaaacctctgtaacacacacttgaaaatggtcattaaagattagaccaaataagctaattaggggtgtttgagggtcacaatactaagtaaactaaattctaattctgatttttctctttaatcttgaaattcttcttttagccatctacccccattaaattattattttaaacctttaataataataaaaaaaactctcctgggaaaagctttttgtaaacataaggtcaaaggttaattttaggtctttcatctataagaaattaaattttctcaggaagctccatcggatattaatgcaacgccccgccagtgctctggagcctgctgtgagttgagccatagctccttattgattagaacatgtgctttttgctgcttctgaattatttatggggggtcccctggggtgctcaggcattgtgaaggcagatgatgaaatccttcagcctgaatggcccaggctgtgggctaggtagctattgggactgaccctgaaggccaggcctcctgggtccctgttgttgtaactgccctgcagtactgcagaggtggagtcacaaaagggattagattggccccagcagactcaagggatggaaacactttgcacatcaggtcccccccccctccccccccccccgtgagtaatctatagagagtgactcaaaggaataccggtacagcacttatacttaaaatagattttttttggcatagtaatataaaataactgaactgccccagagatgttattttctttgttgtttcatcccagaagctaaatgtcatgaggacaattgtttcactactgatatgtttcataattggtgtgtagatacgtgtgagtgtatactacatttgaagatggtgtgtgcagcatccatgctgtttatggatttaagtctcttggaccataaacacaggatggggaaagtaaggaagacccatcttacttttgttcatctagttttcattgtcttaagaaatattttgaaggtgctctgtacttttcagagtaaaccagagaagaaaatatttatgggcgttgttggagaggaggatgtaaatcctaatagggtttttcctttacaactctgccacagtcatctctgaaaggaactcgcaagtttccggatttcacgacgtgcggtcgtataccaaagagccatcgtgaaacccagcagtcacattacatataaaatttaatgcaagtactcctgttcaccttaaagtggaaaaaaaaatgagctaaacttataatccactacgtctatcttgggacttgtggagaaacacgtgcattctagacagaactgtgtctcactctgtggcttgaaggaaaaatcgattatgagccgaggctgtgaagtaggtgattagccgcacaccatctacttaagccttcttttaagccttcttttgatctggcctccctgtttaggttcctgtgttatggaaaagggagagaaacaactgcaacttttgcagccaggtagcctggtgatactgtaaaaacctcaatgaaccttggaaattgaaaatgccgcatcaggcgcgtagaaaggggactcgtctgcgatatgtcctgagttgcggcagcatttctttgacagataatcttttatctactgctgaagagttgctgtctacagatgtattcattttgggggtgacgaattttaaaaggcaaattcttattaaggttgaaacatattaattcatggactaatggcaggcagggaagcgactgttaatagactcaagctttcttttgggggtgatgtagctgttttctttggaactatatagcagtggtagttatgtgatgttgtacactcgttaaaatccattaaacggttcactttatagatggtttattgttaactcatgaattatgactcaatttgtttaaaagctcattaaccccaagagttcaaatttcgtgtgtatatcctaggttgtctttgtagtaaaaaatagtaacaactgttgttaggcttctgcttcttattttttcactgctgctaattgatctttcccaatcacttatgtcatagtgattaaaatagggaagtctttgtgtatagatagggaagatttgcacttcacaactctaagggattagtgatttgtggtcttctgcttgactgttttgagacagacttgagcagcccaggctggtctcaaactcttctgggattataggtgtgagcctccatgcctggctggtgtcttctcatctgcttcttgggatggattcgtactgggtgtccaaagtggctgccatgcttttcctttgacctctgagcatggtggaactgtactttcacaattgttaatgaccagcacactggaaatgggagcatgaacaggcaagatggctcagtgggacaaggcactcgccaccaggcctgacaacctgagctcatggtggaaggagagacaacttgtacatgttgtcctctgccctacacacatgtgtgccatggcatgttttctgcataccctacaaaataagtgtttaaaaaatatcttcattaaaaaaaattggagcacttctcatccaggtggagactttttttttttttatgtgatctcagggtagtaattccaaaccaagacagatgaacacatttatcagagttggtttgagcatcaattctatggaatggctatacatggctctgactccactcagcacaatgttgacatggagggttgggaacatgtgtcctcatctgcctgaggagctctcgggtcacaaatgacagagtgtctttaccaggctcctctgatctgattgtcacatgagggcatggtcatatttgaggactctgtcttttttcatccatctttcttttgttagtataactgaacaaagaatggtattggaaagcattccatggctactcacctagttctacagcactttaaactagataaaatctagctgaatgataatgggccagattagaggcaaaattagacggttcatagcgggcctttctgctgtcttcgttcataagcatctcttttattgaaatatcattttgatttttacacaaaaatcatttctgctctgcctgtatgcaccctaggtgtgtaatttttcattttttaagcaataatagccagatttattttaattaaggagttttaagatgatgggtttatgaacacattgtgagctctgcatttgaagcaaatttccgttcttcgcctggttacttcgaagtttgggggtgacttgagggatgcttttagaagtgatcattctgtggaagaatttgacacatatcccaacacggctggtttatgacttgctatcatttaagtgcatacttaagttatttaaattagggtcacttcaaaagttcacattataggaactaattatgacatggtaggatttaattagatcatatcatcgaaattttgtattggcttgagttgacaggcaccctgtctgactctagctacagaggaatggttgagcctaggtctctgggcagttcacagacagcaacagggatatacataattttttaagtttgagaagaaaagcattcaggtagatggcaaagctgtgtaactcatccacatataataggaagaaagagtcttgcacttcttgcatttttggagtctattttaatcagtaattttcttgaagtgcaacattaatgcagctctgcctcaatgcagctccttgacatttccctcaaccctacctgagcagctggacactagacactcggcatatccaccacattttctaacgggtttgactatacacatcttctaggggttgtaagttttagattggtgtactatgtatgttaacatcatttgaaaatgatgctatggtgggctgggtggatagctccttcagtgagagcgcttccatgaaagcaaggggacctgggtccaatctttagaacctacaagaaaaagccaaccactcctggcatcacatgcttcacttccagagctgtggaggtggaaacaggcaggtccctggtgctccttggccagcatgcctggcctaagcagcaatctccaggcctatgaaaaatggtggttcaaaaaacaaggtggacagtgcctgaagactcacacctgaggttgcctggtgacctccaaatacgcctttatgcatgttcatgtacaaccccacgcacagctaagtggatgtagttacatacatatacataggtatgcacaaacaggcacacacaggcaaacagggagcacaagtaaatgtctgttatttggtacttgactggaaattaaaacaagctggcaagaaggagtgtggggacattcaatagtatacaggtatagaaggaagtggtaaggtatttacctggtaacttaaatcctctggaagtcagagggtcaaaggtgctgtttatacttaagtaatgtactggacagtggtggtgcatgctcttaatcccagcagtctggagacagaggcaggtggatctctgagtttgaggccagcctggtctacagagtgagattcaggacagccaggaatacacagagaaaccctgtctcagaaaaaaacaaaacaaaacaacaacaacaagtaacccaatggcccttttagcataaccagcaattcctgcaaagtcttttgtttgtagacacatttgagtaactattgagagctaagcatagatgtgcataatttacatatcatctccaaacaatcagagggctccaagtgcaccatagcacctgctcaggcaaataaatagtgctgatttctattgtgaaaaagtgtaggtgtatccctaacattttgcccatgaaaaattaaattatctagcttctgtgttatgtaaatgatctagtttgttgaagccttgttcagcaagctccgttttaaatcatgacaatgcaggatagactagattgtaatttttggagtactgtgtcttaaggaacgtttccaagggaaagccattcttcctgaaatgtcagccacatgccacttgtagaagaaaaggtgggaaataaaaacatttttcttaatgtaatacagcgagtgacaaggcgagctgacacgctcatagaggaggcaggcaggcaggagatgtggcttgtggaggaagattaaagtgtcattttacctgaaggttcccgtcatctccccagggcccttgactatacgagggatgggtccctaaggtctaaatatagcacgtctttaattagtcggtcacatgtctttttgtctgactgggtgtttgtgttaagtgccttgattcatgcattttctgcattgtcctatggtccccctttcggtcacttttgtgtctttttattccttccttctgcttcttgtggagtcctttgcgtttcttttttaggcttctgaggtaagatatggattgttgactggaagtctttttctctttactttgtattttctttttaatttctgtacttatttggtgccagagcgaatgtgcagaggtcagaggagaactttttgggagtcagttctcttcttccgccatgttggtcagttgtctttcttgggcagctgcctgttaccatagccttattttttgaatgatatgtttataatataccattcccccattaattttcaaagattattctatttgaagtaaattactttgtaattttggacaggtttcaaacctgctttgcccatcttttgttgaaggcattcaacatttttgtaatgttggcttcagcatccttgtcagataaagccagcacttgatttatcccaggctggtttatttcagctatcttttcttggttaagttgacatttctcttgggtatgagtgtttttcagctgtattctggacattcaaggtattaggagatgttgagccttatttaaataacggtcagtggattttgccgacactgggccagcagagaaggaaggagcctcctgttgccatcatggcacacaggtagaattcaagctctgccctgtctctggggctccatgtctgcttttgggtgggggtaggaggtcaggctccctttaggctctgctgatgtccccaagtgagggggttaggagtgccatgttatatgtttccactgatggtagatagagtgtgacgtgctgctgttagtggtgggtgtgactgtcctcaaagctacctctgagcagtaaaacagagctctagccttactgctaggtgatgggaatggaggtctagcctcctgctgtggccctcacactcacctcagagagggctgttgtcttgtggttcagccccgattcacatccgggatccttgcttgagcttttattatacagctggtgcagggctgcctgttatattttgttggagcaggacagtcatctcctaaagtcttctatctcattagtgtgcttcttgtttggttctcatgttagagaaaacgggcttggttaggagttgtctttgcatgtggctgatactgtagtttttagggaaaaattattccattttgattatttatttcatgtgtctatgattctgggaggagtgcctggtatagagagcatgtggaggtcagaggacaactttcaggagttggttctctcctaccatgtggacatgggattgaactcaggtcatcaggcttggcagcaagtacatttaggcactgagccatctggacaactctgtagcacactttctattaatgtagcttttcagtgggctttgaaatccagaggtgtgatacttttatttttgataattgtcaagattgtgttggttgcttgtagtcttgtgggatttcatatgaattttatatatatttttgaatttcacaatatgcttttataatgttggtgaggatttgattgagtttgtagattgcattgggtgattgccatcttaacaatactgagtctgtatttcgtggtctttctttaactcaattgtttttgagtataaatttggaacttggagtttaatactgctaagtgtaatcttggctgttttggcccagtatcatctgattaattcctttaaaacctcttttaactttatgaattccatatatgcaatgtttcagttaactttttatatcatttctaaatgaattctagggtcagccaagttactgattgacatatataataggattttcccaatcccatgatatgacaacatccactggtgacagtcttaagaaccaagctggccgtcatctgtcaatacacactgtttagacgcattacaagcacagctcatcccattttccatgatccttcattttactctagggtacctccagagtgtctgggttaaatactgttaaattagtttcatataaagtgtttttaataaaatgcttttatctgttcctgtaaattttcttctcatgtgtgtgcctcatggtcaaagagccaagtctgaactcggcaggtggactggagagatgatggcttaatagttaagaatgtgaactgttcctatttttttattaattttttatttaaattaaaaactatctcactttacataccaatcccagttccctctccttcccatcctcccatccccccaccatctatctccccatcccaccctccattcactcctcagagaggctgaggcctcccatagggagtcatcaaagtctgtcacatcatttggggcagaatggaggccctcccccctctatctcagctggatgggctcccaaagcccattcatgcactagggataaatactggttccactgccagcagccccatagactgctcaagcctcccaactaggaggtcttgagttcagttcctagcacccatatcaggcgtctggaaactgcctgtaactccagctccaggggatggatccaaggctctcttctgaacctcacaagtacctgctctcacacacatgcatgcataacataaaaaataataacattttacattcttggggaaaattatgttagatttaattacaaaagttatgagattgcttcttgagctcgcctctgtaagtattgatttggatagttaagaaggaaatgttctgatgtaaaatcgtcagcagcaggtaaagctgagatgcattttctgtctgtgcagtcttttgttgttgttgccatggcagagcagacacggtcggagttgtgaacagtagcctttggtgggaacataggaaggcacagagcagccctggttaccagaaccttctctgattcattgattgggtgttcacatgtgtagtgtccgcagcagagctgtgtggggcagtgaggtgggtggcccagaaatataaatacccagcgatgacttctgagacaggaatccaccctagaaaatgcctggctcctctctctcccatggtgcttttctgccaaagagctggccagtgataccctgcagcagaggctagacctgggtctctcgtcctgccctagcactcctttgctacaccgcatatggggcctgtaggttaaagcacgtgagagagactcctcatgagagcagttcctggaataacagatgactgcacacttgcaagaaacagtctccttctagatgacactcatttcccttgttcccagagtaacagagagcctattagtgcccccagggatcctggtgatgccaacgttctgatccccactagctttcatgatctctctgcctaggaaagcatcttgagaacagaaaggggaccttttgggctttggtgttagccatgtaaccgtacaacccctctatccagaaagcatccaggaagcatggccctccctgtgcttcattaggttcctctgctaatgtggcattagatcaggcaggatccttgatctcatgcaacagaggcaaagtgagatgagcgcctgtggtagcatcttctaacaatgaaaaaaaaaatcacctatgtgtcctgggaacacacaggaaggaacaaatttctgacatgagtgtctaggttgtctcaaaacagccctaactttaaatttcagaagcagaccaggtagagacactgaggaagccagatgagtaagtttcccttgtcccatggtaaagactggcctgtttccagtgcctagagcatagaatgtattgagcctccttgtacatggactgggaatataaggtggggtttcttggtggctgtgatataaagtttagattattatgtaatgcacagagggcagcttccagcttccaatcagatgaacgatggacatgctgatgaagaaaggtaattctggtaatagcatgaaagatggattagggagttgggagcagagggaaagcgcctatctgtgagctctgagtagctgaggcagaagaaatgaattgcaaaattggtctcttacgaaaaggtaggatccatctgtacttcagtgaggaacatgtgactatggcctctattctagaagccctgtcttcttgtgagtaatactggattaaaatcctctgttaaatcgaattctgtactataaggagaataaaattggttgttaaggtaaaaatgctctgtatttcactgaaggtatttaatgtcttttacatagtaaatttagcttgtgatcttctttgagttatatagttttaattttaaaagggcagaacccggatcagaacatttgagtatgaatggatgctcttctcggggaggcaaccactgagggttgtgtcttaagctacattttggggttgaggcaaacaaggtaggttcaacttatgcatgtaagagcccaaaggagcacagtgttcctaacacagttaataatgcttacaatacagcggcccagggacttagtcacaggacgggcactccggagtaccgagtaccgttactgataattttgtctgaatctgaaatgtgaaagctttaatcctaaattgacctcttgaagtgacacattgaatccatttatgacaggtaaattctgtggttctagaactgaacaacccctgggtcacttggctgtgacttttgaggtcacatgccagtaaagagcctattttctgggaattctgtttcctcctttgtgcctcaagccgagtgtggaagtcgatgttcctagtttcattcctttagactttaagtagtggctgttgttgtcatcaacggtctggctcgccacagcttttaaaatatgtgcaaagtacttgagcgaagggcatgctgtggaggcgcagcctgcaggcgcgatggctttccccttgtcaagagtccggttagtacacactgctacaggagccaccatgttgcatggaattgttcccttttctttcagttgttaaaacagagggagaagtatatttcttcagaatgttctcagccctcatgcaaaactggtccctttacagacgtgaagtgatgagtcttcgccatggcagcctccttgcggatccccagtgagttcgtcgacacagttgacttgccttatgtgcacaagcactttattcaggtttgattaaatggcaaaaataatagctggagattttgttccctttggtctcctctgaaccgtgaacatgcagtggacggtgctgtgagttgaaaggaaattgcagggaatgtcaaaggttcatctctcgaagacagtttgcccaaatgagaaaatacatcactctggagagtgggtagcagacacacactgctttgtatttagatttcttgaaatattactatgcttcaggaagccactcctttcctttcttgcaatgtttaggtgtaaatctttcttgctttaaacttgcaaagtggcaagtgcccgttaaatttttcttgactctcagtttagaaatgcaggtataattagaaatgcaggtaaatgcaggctttaatttctttagagcggttataagttcgtagcaaaattggaagaagtcaggctttccatacttgccctacccctcccccctcgcaccccagggtttctctgtgtagccctggctgtcctagaactcactttgtagaccaggctggcctcaaactcagagatccacctgcctctgcctcctgagtctggggattaaaggtatgcaccaccacttcctagcatacccccatactattttaatacacgtcatcatatgtatcttgccgaggatcgcagccaggtgggaggggatccagggacttttatttgttcttccctcaaaggcagaagatagtgttcttgtgacctctgctggggttctgatgtgaagtagcaggttttctggccagtacttggcttggggtgagacccgctgctcactggctgcagtgtatggacagcttgcttttcatgaaaccctactctgttcatctacaggatgtgggtggatgcgtttatcgtgtaggcttctatcacaagaattagttaagatcgtctatgtaaatatgtgtgactatgcctgagcccaaagaaggtatcctgagtgatctgatgtaggtattcttccacaaattgacacccaccacctataatgttctagttatcctttggaatgctggggcacacaatgaacaaagcataggattgttgtcctctaatggattatatcttagcagtagacacaatattcataataaatgagaaaagtatgtagcatgtggaaaatttatagggctatggggcaatgtgagtattgtgctattacactagggagtaagagtgcagaaatcacacaacttattgttaagttgtgagtgactttaggattcattaacaggaccctccaacaatgaatcggaggcatttgatgttattaattccaccaaatttgtgcacacaattctactctccccatgcatgggaaagcttctgatgataataaatgaatactcaatactaatagtagcagttataaaaaccatgggcatgcccatttttgctacatcgtttcttccttcctgttttattctgctacactgcactgagtataagtatcaaaccagtttaagagttagccctttaagaccagaacagagcgatgtataggattcttatgtagactcaggatttcccccaccgtctttgattaatgtactcccccttctgacacaagatcatcacactgaaccactggcatttctgaaatagtctgctcaggagtagttgctgacaaagaaagctgtcagcttctctgtgagaatcagtcaggggttcagatggatggttcattggtacagtgcctgaagcaggtagatatgggacatagtacagtgttactctttgcaatgaccgaacagcttccaaaaattgggagcccttcagagggcaggaatgtgctcatctgctggtttttccatctcatcaccaggaagaggtaattctttaaaaaaatgctgtcaccccacgtctgtgcttttgcgcttagtctttctgttcgggaacactggagaccatacagtgtctctgatgtctctggagtagtggttgccagccctgggagagtcattgctcctccttcataatctactcttgcctttctcctttatttctgaagtgaaatggaatccaaagcataattctgtacacaatttaaaaagaagaggtgagccataactaacataaagagaaaatatttaaaagtattttactgtatgaaagtttgattgtgagtacttcagagtacaacatgaagtttgggtctctcgggtgtttggattgtcttataatgaatggatttggattaatgggaagtaaatctgtgttggcaaaagtttctattgagatttgaagctttgacataagtgctaaataaatatacacagaaatgcacagagcaaccatagatgtgatatctccatatgcaggttttatagatgtgttttattggcaacttaaacaccaagagttgtggacacaccttctccatcatggcgaacaattctccacacatttccatgccatgcaaaactgtatcttttcctcagtttgcaattaaggaaatttcattctttgaaaaaaaaatcaccgtatgtaaaactatgcaagaagtacactagtctgtaagtaaaacgagaaagactgtaggttctgagattataaatagtctccctcacacatgcattggccagagagtctgctcgatgtaggacaatatctgtctcatcccagaccgtcctgtttagccggcctgccaaatgtcatcatgatgattgaaaatcacattcaaatgacccctaatgccatgtgtccccaccccaggttaaccattggttaaaattcctgcagtactggcactcccgggattctgtaccctgttactcctgcagcctgggaccacaccttgtaaaaggggtgtccttggagttctgtaactattctgcttgaatagatttccagatggctgcctgatgacatttggggatatgggagtgatttccagatggctggtagttccccagtcccttcctctgatggctcttctggccaggttcctcaaaggctgcttggtcagatacagtggatacagccgtgcggtgctcctactttctactacagccacgagggcagaagttttattggtggtgtgtttgtttttgaccagtggattggctgttttctctgttgtcatcgaaatggtattgacatgtaccaatatgaattgctctgaatcccggtcactgcttctgatatgatctcactgttgttcttatcattgctgtttttcttttattaccctagtttcactaaaatgccttttattacatgttactattccatcaaagcaagtctgtcttcctgacttgttaattaatcattcactactgtcctcaagatgtcttttttttaattgttatacttttaacaggtatcatttaatatcgaacaccttaatttttgaaataatgttgtttttctgaagtctttgtgagagtcaagaagtccctggaaaggctggctttctagaaagtgcagaagaagcctgtatttcagttaccacatttcctcatgtgtggctgtcactgagcctggataaggacaagggatacatcgtgcaggagaattaaaagctctttcaacactctctgctggtattaaaacgatgaaagtctctggactgggtggttttgtgtgacacaagctgggatcgtcagaggaaggagcctcagctgaggaaatgcctccatgagatccagctgcaatgcattttatcaatttgtgatcagtggggaagggtccacttctggtttgggttctataagaaggtgggttgagcaagcgaggggaagcaagccagaaagcagctctcctccatggcctctgcttcagctcctgcgtctgggatcctgtcctgtttgagttcctgtcctgacttccttcagagatgaatgacaatgatgcagtagaagccaagtaaacctcatcctctgcaacttgttttttggtcttggtattttgccacagcaatagaaaccctaactaagacagtctcattgtagtgactttaatagtgttcattatgcagggttttttttttttttaagagaaaaaaataggatggggtgctccttcagtttatggaacactaaggaaaattattcagtagtttaaatatgctatcatcaactcttcaccaactagaatcatcccacaattattgacatgccagaaattcattaaaaatatgaatggattttgtttgtcctgcatgcgcaggtgtgagtgcacctgtgtttgaatgcatctggaggtcagaggttgatgctgatttttttttttttttgatcttttttgatcaccgtctgacaagtgtttttgagacagggcctctcggtgaatctggaactcagggattcagctcgatgggctggctagcaagtgttaggaatgtgctggctccatcattcctactccagcacggggattgcagatccgtccactgcacgtgccttttacataggtgttgaagatctgaattcaggttctcgagaatacatggcattcacttttttttttaaccaaacagtctccccagtttacttaaatgatgccctttatgtctctttctagcacttaggttgcctgccatatacaagtgtgtgtgtgtgtgtgtgtgtgtgtgtgtgtgtgtgtgtgtgtgtgtgagagagagagagagagagagagagagagagagagagagagaaagagagagagagagagagacagagacagacagagacagagacagagacagagacagaaagacagagacagagacagagacagagacagagagaggggagtgaggggttgggttgaaatctgtaaggcatgatcccctccctgcattttggtccgccacagagctttatacattacatttgattgatgtatgtacagaaactggctctactccccgccctcttcttaattggatgacatttttagatttgatgctatttttaaaaattgccttcaaagacttttaggtactagtgcacttgaaacagcctttttgtcttttaagcacatgggactggagactgttcttgatgaaaggcttctgttttcatgtgttgccagacaaaacttttactgaaggagcaaacagccttagggaggctaggtgatttgtccagatcactagctggttagcgatggtatcgagaccaggatataagccaaggtgcaattgaaggaggtcgtttatcactttttaaaaagctgggtgttgcttcatggtgtgatgggatggttcaccagtgttcaggtgttggtttacactggatatgcacacagtacagtaagctccggagtcaagtctaaccaacctcaaaaggagtttattcacaaaaggatcttaagtggaggcatttgacaaggaaatgtgatgaacagaatggcaggatgggggcagcagtcacagatgaccccaggaagtgtccgcaggaagaagactgactgaagcaggtggggaactagccttgtgcttaggggctgtggatgctgttactctgctagttctcatataaaactgcatgtttcaaaaaaaaaaaagcaaacaaacaaacaaactatgatacttgggtaacattcctttgtaatggtttaattttgcttttggattcaacgtattactttgtataagataatacaagcacataatttggttttaatagcttcggttttattaggaacagatataaagatgcaatccaagggctggcagcattcgggaagtataattggacagtgcagagagatttaggctgttttatcagatggctcttctgtttaggtcatcaactgcctgcatcatgcaattctctggaattgtggagggttttgaacacattcagctccaattatctgacaggtgttcttattcagaatttcagatttcatggctttgaactctgtagttgatttgagttatttccctttacttaccctggaagattagggcaagaaagaagacaaaaagggcagtctcctgcctctacttaatcctgggcagcaggggtcatgcttgctttgtgtcctcagtcaggaccttagctgagcctggcctggtcactacactcctttcatggtgaatttggttactgaggtcttgcagcgtcctaatgttggctggtctcactaaccatccagaattagggttcaactaagatatgcacaagacacattctttaggacagaatgtggcttgctcttcagtcagttctcatattttaaaaaaagtatttgatgattggagctgtttcaccaacatgtaacagacctgatatttcatgactcacttttgaagttgacagatgtgttgacccttacggtgtatcatttgacagcaggggggtcagtttggggatttttagtgcatcacttgtgaatggacctgcatgtatgtgtgatcaagagattgagtgtccctttcctttcattctccccttcctttctttctgtgcttttcttccttccctgtacattctacaacacattggttttgaacttcgggagaatgaaagggaatttcctcccttgaaaatggaaacatttccagcaccactgtacctagtgggcacgttcactattgtaaaaggtagtgtggtagtaccttcactagagttttcttctgaaaatgggcagttataattagcttgtggtgttttgtttgtcttgcaacccttgagtgataaccctctttgctgtgttgtgaggcttctctcctgagtgacacccaaggtgtcagtcttcatctcaaaatggcagcattgattgcccattagatgattagtttccaaaacatgtcttttttttttttttacttcctcaaaaattcattttgtgggtactgcacaatagctcgaacctttatcagtgtattaaaaagacctggcattggtttcctttgattttaggacacgatagaaaagtcaacaatgtcacttatctgaaaaataaataaactggccaaacaaaagagcctgcctcagaagtgtacttctatctatggtgacagacatatttcgatgagtttaaatttctttcattttccagagtataattaaaatgagcaacaattacaaaaacagcttttcttgtctaaattggaagaatttcaaaattaaaaaaagtaaagattccgcaaataaaatagtactaaaagcatgagggagaaacagattcagttagcagacgttgtctagcttccaaatcattctttactgtgacacatttagtagatgtatcaaaaaataatcacgaacagtaaaaatcatgtattaggacaatatcctagaaaagatagctttttagtcttaaaaacattggaagaattgcctgtaaaagggaccagtgaatgcaaatgaaacacgacattctgtcttgagagctcttattttctaattgttaggctctaaccctctcagatcaggaacttctccttctcctttgggtaacttcaatgcagcagagagtgagtaataaattggagagtaacaaaagccgttcttcatttggttggctttagtcagcactcagtaaatatttatttagcatatgttgtaagtcaggcacgctgctgcaagctggaggtgctgacttggataataggtggtcctgcccttctagacctcacaatgtagcaggagaggccaatgtgtaaataaccaaccctggtgcattcttcactggttatgtacaggctgtcctggaggcacgtgggaagaacatgttggattggaggggtaaaaatacattaaagcttggctggtctttgaggcattatctgtaaatcaaattaatggccatctaaccaaggtctttatgagccaggaagtgtgccaaatacaaagaatggagagaggaattctacataccccttatacctcggagcctactgttttgtagaaggtgggcacatgtacaatcgggtaaaagatcccttgtgcagagctgtgagtgattgttgtggacagtggggagaaaggcaagcacggctgagaaagacagggctcaaagacctgggaggaccctggagtccacgtctcaatctagggaaatagtgatgggtggtttgaaagtcagtgttaggcagtggaaccagatccatgaacatctggagcatcttaagtgatggggtctggggtctttagcatttgaacaaaaagcaggaagagatccttcaatgtcaccccttcttccctgaagcatgtcataaacctacactccagggctaccctccttacacctgcaggaggaaagcatccttatttttggagatggggggtgctaggaagaatctgtgcaaaaagaccttgttaagtcccttgccttctcattggtgcacctcacgccccgagcaggcatacttccatacgacggaccgcccactcttcatcaaccctgagtgggaaagtgcttgctccccctcgcctttggatctttatttccaaaggttccaacatcatgtaaaatttacatgaagtaaatttgcatgcttttccttctgttatttggtcttttctgatagagtcgtcagccaggaacctagtagtaattaagaaaaggagtgtttccttccttacacggagaataagttacttagaaggaattctgttggcggtgtgaatgagaatggcccccttaggctcctatatttgaatgctgggtctctagctgctggaactgtgttgtggaaatgaggaggtgtggccttctcggaagactagaaggtgtggccttctcggaagattagaaggtatgtcactgggagaaggctctgagatttcaaaagcccaccaagccaggcccagtctagccctccctgcttctaacttgtgaataagatgtaagctctctgctcttgctctagtgccatgcctgctgccatggtcatcatggactcactgtctgaaactcttaagaaaagccccaattaaattctctcttttacaggtttcctgggtcgtggtgtcttttttctaagcaatagtatagtaactaagacaatcctgtagtatgtggcagaaaatagcactgaaaggcagcagacttctgacttctgatgggtgatggagatgtgggtgtgatagttacgacttactagctgcaagagagtctcgactatagcggcataaatgtatgagtttctactcttacacaaaagaatcccaagagaagcactgtaggacgcttggatcttttaaaggtcctcagaatgtagctagggattatgctggtttaataaagtgatggttgtaggttctcctccaagatctatggcttcactagccatggatagctggctaggtttctggtgccaggtgtgattttcctcttgctggtcttaagtcccatcggagatctgttggtttctgcccaaggtatgcatgccgctactgcaccctcagggttattgtgccatggagtttgttgtggttcagagaatggaagaaacagacttctctaggggagagcataccagtgcattacccaataccaaatggtcagccccgaaaacctacaagtaacattatatagactgagaaggttgcacttagatatttatgaatttatattcataaatacatgtattgcacacacattaacaacaattaatgaaaacaaaggccatgaatttgaaaaagaccaaggaggagtaacggaagggtttggtgggagaggaaagggaaggaggaaaatgatataattattataatctcaaaactacaaaaatcctcagaaagctgggaccaccataggtcatgcctgtgaaccagcccttcaaaagctgaggagggaagatgttgacttgggggtcagcctggggttctaggggctatggcacagctcaggtggagtcctcaccagcttctgcaagtccttgtgggcacctgtaacacggcagggttacaggtgttggtattcatcatctgggaacttgtgctgtttgtgctatttgtgggcacggctgggactaggatgggagtggtggggggtgttggcgggttctcggagaccccttagggtgagctgtttttgctgaacttgaatgtgcattttgtctctggggtcctgcatggctcctgaggctccagggaacaatagccattattatttttgtgacagaaaaaaaaaaaaaaaaacaaacagaaagagccatagagggtacctaccttgtgttttaagtttggtttccccaaagcttcatgcaccatttctatttagcaaatatgtaaaattcaagacatcacggtgaaggaggaagggagaagaggagtgaccggcattcctatcacgagggagtgtcatcaaatttgggtttctaagtatttctctggctggaggctggggtatgaaataggcggaagtcaggggccctttgttttgcggttttgttttattggtgctgggtgtgggcctagtgcctcacacataccaggcaagctcttctctctgagttatcctagcagtttttcttcttattgcttctcatcacagtcacttctgtgagggcatggtgatggctggagggcagatctctttggtcactgtggggcagacgggttacccccacacacctgaacagactgagtttcatgcctagcaatccctttcatttaaagacgattggcagggttacaggtgttcgtattcatcatctgggaacttgtgctgtttgtgctacatgctgacggcagtgagacagacgcaccagcaatattgctattgcaatgagtagctcatagcttcttagtggagagaaaccccatcagagaaagtacacatatttcaccagcggggagaaacaatgccttgccattgtttcggggggggggggaatatgaagacttgcatttataaagtattcatgctcttagtgggaaaaaagtcaggaagctgctggctgcaaagggcctttccctccttcatccctccatccaggctcctgggatggaacccagggcctcacacatatgtggcgaggtctctgctgcccagcgtatcccagcagttagtctttacagtgtttctcattactgtcgctcctgagtggacatggtgacagctgcagccacccagccccctttctctctagtgtcagggcgggaaccagagtggaagccagacacgggaatcagatttcagaacacacacaaactcatttcagttacaaaatgagcagctccattagagaaatgaggttatgaagccgagatgccagcctggatcggaccttctgttgagcctggctcagaggtttctgacttgtgggtaagcctgcctcctatgcagtctttcaacggaagagggcggcagagaaaccagttagaaaactgacttcccagtttccttccttcctatataagctcttgtgtggtgtattccaataggaaatgaaaattgaaagtagtaccccttatatatccaacctaaagtgagcagagaagagttcagcacgatccagatatctccctgtcagtttttctctggtcgcacagatgttgccaagtggattaacacttggggattttgatgctcgtagatctgccagtcaaacgggatggattctttactgcaggtgaacaaccctgatggggcttagcttttgctaggcattctgcgagtttgtagaaaagcctgtgtgcccatatgtttgcatggtttatggcaacacatttgcccgctggtgttaaaggtcctctaaggaaagtcgtttcatttctcaccaagacaaagggatgctaatgccttttgacttaattttggtttgccattggctttatttttgaaatgtggctcttacaaccccgcttccccttagaagctgtctaagctggctgattgggtggtttcatgcccttgacctttaaaatgtgatgtaactgatataatttttctgcagagcatggtttatgtcgtgttcgcactctgagctggttgcatttgctgtatatgaactctatctggctactcatagtattctattcctctttatccatgatccaggacagttgcataccctagggcctccctctgatatttcactatcttctgtgtttaaggtacagaacaatgtgtagtacctgcaggtattacacccttgctccactgtgactcaagggatcacgttacaggtgctcctttgaaagggaagcaagggagggactcctgtgtcattttatattgtgataaatttaatctgttgatgttgttccttacagcccattttatatgctactttcaaagtgagaagtgtccttctccaagggagaggatgcatcccatggcctggtgacctaccagaaaatgaacatggatgcttatgtgagtcagtcatgatgagctcaagatatgagacccttgcttgttcttattggcagcatttagtggtcatctcacctgtcatctcctgaccgcagccctcctcagcccctccctgttttagtcagtgttgtttctaatagcgccacatgtgtgttcttacaaaacgagatggaagaccagtcacctgaactgtctatctgtggcctcagatctcatctccgtccatgttttaggataactttcccacgaaatacactgctgcccagcaacaacgttctcttcgattgcattaattattgctctttttttaaaaaaataaaactagtttactattttatctgtatggatgttttgcccacatgtgtgtctgcacaagcacgtgtgcttggtggctgcagagtccaggagaagggaaagtgagctgagtgctgaccgcatgtccctgactgtggacaggtgaacaggttccttaagcccctgccactgtggcttcaccaccatgatggtctgtcccctggaactgtgaatagattccttttcccttctgctcgcttttgtctggatattttaccacagcttcatgacacctgctgtataaagtaacaaataacacccactgttaagcccagtacaactttcaccttaattatgtggttcatccctaaaaacttgattaagatccttgtatctcccacctttctatttaagtcgttcgacacatagaatgcagttgtagacagacatggttgtgcatgcctttgatcccagaactcaggctggaccagcattctaactcactgagacatccccagcccggggtggtcaaatatgcacaaatctgaacaaatatgcacaaatacgtgtattgttttctacaaccccttccttaaaatgtcaagtgtgacactgtaagttgatatattttgaattccttcttatttgcaggtaacactagatgctataacaacctgagtggggagcagatgtccccgcccctaggaagttcactgtccacaggagaaccaagaaatgcaagaagtttataaagtagtgtaatgaagcatgggtcacgtggactaggaatgtggcttgcagtaactgggtgcttaccccagatgagggagactccgggctggattctgaactctgccccccccccctgtaagaaacaaaaggcctaaaccaaactaaacaaaaagtatgtatttcctataaaggctaaagctgttgaagatgtcctctttatttctctggtgtcctttcaaccccggcagagggacagacggcacaccactaagatgtttcctctgtgtgcctctggcgtcttggcgaacccaggctctctcttcatctaatagccagtcactattggacaaaacagaaaagcattgcaagtatctcctgagactgactttgtctcggcgtaactcttagtaatttagtttttgacacctctcagtaacatgctggtcatttgcatgttgttctcagggcttcattttatatgacaagcagaaaagaagtgcaatcctacatccctaaattatatatccccttggtggcaattctagtggaaaaataggattcttcctaataacattaattctatgttgttgttttttaaagaaaatgtctctacaaagtttggttttcaattgttttcctacatgtgcttcaaaacactgactccccctccataaaaatacatcactgaagcattgttctttctaagatcgtgtccactggaagtttctttctcaagtatatttttagaagtgtattagtacccatttatctatactgtctttgttcagtattgttctaccaaaaccaaataaaatattttctaagtgtgggatttcacaatggacagtttatcatgtaaacatctcggtagtgtcgtatagcacatgaaggaagaaaaataaatggatctgcatatctctgattcctttcctagtcacaattctgtgctgcctttgcacactaggaggcttttcttaagctctacctactaacctattaggagaaagtcatgaaggtttgatgtggatgagagaaaataaaatggaggtgcaccattttaatgaaataccatgaaaatgcagctctttaatgaagtaaaatgaaaatatagtgcttcaatggcagcttactgaaacagctggctattttcaaatttctacccaaattgaccaatcctgtcttttgggtttgtctttccaccttggccaggggatctcctttgctagaagcaggctgtcttcggagactctgggagagcagggttccctcttctgtcatgttatctttcctttggaagagtccttttgcaagtattgatttcaggacactcggtacacggtactggtttaagtgatgaaaattaaatggattactctgtgggttaaacatcctaacagtgagaaggctttggggatcaaagcacacaatgtattttcttatcaccctttccatcttggctgcacttgacaaacctttacagtgaattgagtaattttatgtgtgtaaggtgtatgtaatgtagtctctccaaggtgaatattcctcatggcaataaacaaaagtcccagagtgattcctgtgcagctgtaaatttacagctggctaataaacatctcttgatggtcaatcatagacaaagtatttatattagacagactttgccacgcctattgaccatgccattcgagacatggaaatgagcctctccccccctcccaccctcccccatcccttgcttggtccacacagttagctgtggctgtgggattgcagaaatggcaaaatgccttgggatacaaccttggggtacaaggggttgcctgccattctggtgagtagtaggtacatgtccattggaggccaggaggatggctcaggcagttcactcctagccacatggagaggctaccacactagtaaactgtccttccagtatggaagagcgggtgcagaggagccagagttcacatgcctagagggaactggctgagcaaagttacttgagtaaggaattggtggtaaagcatctcgggagattgctcagggtgcctgtcactagagacagttcttgcttgtacaatgtggaaaggaccactgcttgttcagtgtgaccagagagacagttgtttctgagtcaatgtaaaaggatgctagatttctgagaccttaggttgggccagcacaggtcaggatggtgactatggctgggatctcttggaaatcctatgtggtgagtgagctctttccccttagctaagaaacacacaagccggtaagtttcgatgctggaggagaagcagcttctctagtccagcattctcaccagggtctgctgggcaagagtcagtctgtgttggagcaggtgcatgatgagtgaggagtagcttggatgaagggacattggctattactggcacctggagtgtcagctttcaacccagcatctcctccagttgttttgattcacaccctgtcaggctgtgtggagcactgcaggcctcaggggtggcactcgctctccagctcttgcccaggccctgcttcctcctgtgcacccctgcaaagcagtaaggtaggctattctgcacagaaaggctgcctagtctgctcatgccggaagaattaattttagcgaaaccaacttggagaccaggcgatctgtaatcagtgggctggtgggaagggatatcattgtttgacattaatgaaacccagctttctacatgcaagttcatggcttttctagaagcagcaggcagtcagatcttgtccgtggaaagatctcagtgggtgagggggattttttttttaagctttcagattcttataacatactgtcttatttttcttctaataaaatctgaccctaagcttaagaatcagtttgtcagatatcagtcttgttttcccttgaactcacttcatgcttcaaatggattgtaaactgccaagtgactgttctagtgccaccttcagtggatagaataattcaatgggaagggatttattcattattaaaaaaaatgcatgtgagctatacccaggtcttaacattatttctttatcatacccagcacaagtttatctttataatgtagtatattgtcagcctagtagacaataattgcttttatttgactcccagttggaatggatttagtaatttttcttagttccttcctcagctatatatatttttttgcgacattttgggagataattaagaagcaatccttgaactaaaggagcctgtggtctatgagaaacaaaaaagaagttacatcaatagaccaaggctgtttcatggcatagacagattcagagcagagagatgctttgcctaatgacagacattcagagaagatagcacagcagaaagacagagttgtctgggtaaagatgatgacttacagacagggaatagctcatcctgagcagcagagcctgagagaggaccgtggtctgctgacttgaagttacggtcacaatcttaacttatttggaataaagccagtatttgctttgttgactggaatggctgtgctagctgttggatctacattctattctaggctgaatctcctggggccggggaggtggggaggttttcaaaagtgaagcaaatctgttttggtctaatgtagatgttttactaattatgcagtgactggaatagagggcgtgaacattggaatagaggatgtgaacactggaatagagggcgtgaacactggaatagagggtgtgaacactggaatagagggcgtgaacactggaatagaggatgtgaacactggaatagagggtgtgaacactggaatagagggcgtgaacactgggatagagggcgtgaacactggaatagagggcgtgaacactggaatagagggcgtgagcactggaatagagggcgtgagcactggaatagagggcgtgagcactggaatagagggcgtgaacagtgggatagagggtgtgagcactggaatagagggcgtgaacactggaatagagggtgtgaacactggaatagaggatgtgaacactggaatagagggtgtgaacactggaatagagggcgtgaacactggaatagagggcgtgaacactggaatagagggcatgaacactgggatagagggtgtgagcactggaatagagggcgtgagcactggaatagagggtgtgaacactggaatagagggtgtgaacactggaatagagggcgtgaacaccggaatagaggatgtgaacactggcatggggatgctgacttggggagccagagtattaggcaacaagagtgactgtggtgtagttgatttacatctatttttattttttagattgtgtgtgagtaagagtggtatgttcgtgttagtgtgtcagatctccctggagctgtaggtacaagcagttgtgacctatgtgtgtaggtgctcggagttgatcaactcctttgcaacagcagctgctcactgttaatccctgagctatctgtccagccatattagaaaggtagatccatattcagtactgcaaggtttttcagggcaggagcggttgagatactgtgccaacactgatgttataactatgagaaggccaggttcctgttgagattgcaagtagggtaattttctgttatacttgaacccatagcatgacctgtaccccctttgtcatcacacataggtctttgtattgtaattgtgaattacttatatggagtatcagcctctcaatcatgggtagcatgcggtacacaccaagtctgtaacagatgctcagcagccatttgaatgttcgctgcgagccttcagcccctgcagtgagggattaactgttgagtttttttttttttttaatcaaaaagaatttaatgtcttgtcagaaacaagtcttcctgtaagtcagttttaatgtcatcaaatgatgaaatttctttggacttccacttttctaaaaactacccagacctagatttgactgttcccttggagacaactcactatagttcttgtggtttagagatttgatgatgatgtgtgtacacacatggatttttttcttcatcttggctatttgaacccacacctctgtgtctaaatagtaattccattgtagaggaatttatttggaaggtttggaaaaccactcctgtcttctcctcttgagttgactgcacttaagactgccatggggttcccatggcatcaacacagctggaggtctggtgagcttttgtgaatggtatttggaggaatggtttgtttgccagagccttaacaatcctttgtattgtttccatctgctttctgtctacagagacacgggttgggattttatttatttaatgggctttttccccccagctagttagttcagctaagtccacaattactcagagacggcagggttcactctcaatttcttactgatgggccaaaggactggacaatcactctggagccaccaacccagatgttataaaaagacccatcttcatgaacttgctcggtgctgacacatgggacccctgtttaaagagcaatctgaggagaaacattttgcctctgtttttggaggcttgttttctaaatggaaaactatctcaaaaggctttttccagtagcctgtgtagtgttcaacctttccaatttttgttgttttgttttgttttggtatttctcattcattccaacttgcttggtagctatgcttattttccttttactgttagcagtagtgtttccagggctggaggtttagtttggtgctggagggcttgcttgccaaatctaagttcctgtatttgatccccagcaaaacaaacccagtgccccagttattatctatgaagttcccttagcagctaacatccaaagctcttgtaaacgcacaaggcagaagctttctggtcgtctccattgcccacagctccttatctgacaggtacctgtcagatactgagagaactgaaggaagatagcctgggaacctgtggcacaagtgtgaagaccagattcctagcactctcctaattaggaatggcaactgtattttttgttgttgtttgttttgctttaagatttatttatttatttatttatttatttatttatttatttattatgtatacagtgttctgcctccatgtatccctgcaggctagaagagggcaccagatctcattatagatggttgtgagccaccctgtggttgctgggaattgaactcaggacctctggtagagctgcaagtgctcttaacctctgagccatctctccagccccagcaactatatttgtaacctcagccctagagggagcaaaggggaggaagatggggattcctggagttcattggctggcccgcctagttgaattgttgagagcagggaagacacaaactataacctctggcctccataaacaattgcaggcacacacaaattaaatttggacaaaatggaattgagtaaagcaaagatgaaagacttgatggcagttgaagggtggctgtcggttgtgctgtgaaaaccaatggtgagaggatgattcatctgaattcttccctggtaagtatggcaatcataggcgaacccagcctctggtcacactgcatttcatcccagaaagctcatggtttgtgcccatctctccaagggcactgtgcatgtaagtgtggcttagctgacccgcctagtgaagttggaatgtggagaagcatcacttctccctgccttgctattttaaaaccatggaatttctcctctcacccccattctggtgagaaatggatgagcttcaaattctgtttgggggaatgtctatattaaacaaacgcatatgggtatcaccttcactgtatctaattcctagcttcagattgagaccacagtcatcttatataagacattctgttgcatactaataacaacagggcttttacctgctgctgttgtgatcttttgaggaggattctgtcactgcaaaggacagctacaatatagcaaatggcaaaatgtgtcagaagcatttcttagtgtttgaacctatctggggtttattaattttccagatatgggttggcatggttctgtgaataggcacaaggcccagagagctggattaggtaggcttccaggggctctgaactcacgtcaagcaaaactgccatgctaggtgactaagtccactgaacggggaaaagtctaaaattgctttatctcttcgcataatgtttgtaaattttattcaattaaattacagctttagggctcatgaggtagaaattaaattttttgtgaacttttgataaggagagagccaagcgaggctgatcagcagtggctgctttggaaatgtgttggcagatgtgggaaaataaagggtttggatttcaggagcccttgactttgcagagcccatttgctgagtggagggaggggtgcacctgccgcctgcctttccaggcatttctctgttctgagtcttctccaagctaacctccaactgtggagcaagcagtttgtaacgttcactgttacaggcagcctgctttccttgtggctgccagtgatggatgctgcctgtcttttcccttccttattgcatgctctttagggtttaagttaggaccacttcagtaagctgcttctcccttgagcagcagatgcctcttcactttggtcagctctgccagactgaagggtgacaacgctcacaggactggctggcttccaaataccatttcttatggtttgctgattttcattttgtgtgtgtgtgtgtgtgtgtgtgtgtgtgtgagagagagagagagagagagagagagagagagagagagagagagagagagagaaagagagagagagagacagagagagagagagagagagagagagagagagagagagagagagagagatgccccagacttcagcaggaggcttgcatgctttaattgagatgtagtggtggtgacattctttcctagaccaagctttgtgcatgcctttgaacattcgctttagcaaggcccatctgttcacttcccttttgaattcatggtgtgtgtgtgtgtgtgtgtgtgtgtgtgtgtgtgtgtgtgtgtgtgtgtgttttgttttgttgtttgttttgagacagggttttactatatagcgcaggctcatctcaagttcatggttgtccttcctcagcaatctagtgatgtgattataggtacatgccacccacatttgtctttttgaaatctagttttcattagactattcctcagtcactttaccaagaagccccttgcccatcctctatatctagtcactctgatgactgacaggatcctcatcttctgctgtccccagctagtgtctaatcgcttggctgagtcagaattcctctcacctttgatgtttcctcttatcatttccatccacagagctaccccactccatggttacagtgtctcacttttctgcgatattcataacagggcccaggtatatatagagccctttccatcactgtaatactcctgaataagatattgttgttggccgggcattggtggcgcacgcctttaatcccagcactcggatctctgtgagttcgagaccagcctggtctacaagagctagttccaggacagcctccaaagccacagagaaaccctgtctcggaaaaaaaaaaaaaagatattgttgttgttatcaccaccttaactactgttttagctttggtttatctctgacccgaacaaacttagtgcattgtttatattaggggaactaatactgggaatgcacaaaaattgagaagggacataatgacaacacggttcatgggacacgtgtctgtctacttgtcagtgcttactgagcagtggatatattgacccagtgcactacggctgtcctaaatctcctgtcccacctaccacttgccacatgtgattgataaggttcaaaccagccaatatcttttccctagaggactcctctcccatcacaaagcatttggaattctcagccatgtccaaggctaccaaggtttttaggcatgtattcttaattttagctctgatctcacattggttccccagcaagttcctggttggtgatctactccacatagccctgcaatagtctttgtgtgccagaaataatttttaataaaataacatcaagccaaaatatacatctgaacatatgtatgtttcagagtatctgtgttatgtgtgtatacatactatgtatgtgttttcatgtgatgactgaaagttgattctggggacctttcttgagttctctcttcctttattttttaggcaggatcccactgatttagccaggatggctggctcaccagctttaggtatcctcctgtctcagcggcgcctgcacagggactataggagtggatcagcatgtgtggcttctttgtgggggctggacatcaaactcaatctctcatgcttgtgtgacaagcactcagtcaacagccacctgcactgcacccttccaaagtttgtttatatctacctgttgtctgtctgtctgtctgtctgtctgtctgtttgtctgtctgtctatctatcatctatctagtcattccgctaattcaccttgatcgtggtgctcctaaatatttagtgataaattaaacattgtaatctttggaggtctttatactgcaaagacagcttaattcagaaaatgtttttgagcatctattttgcctcaggctttatcttagattagaaacattcaaggctatgtaattcataggcttttctttcagggagtttccatttgtagtggggagcctgtattttatgttctgtgccaggtttgcaaactacatacttgggaagccctgaaaacagccataatttgtatttgtgtcgactgaaagctttttcagaacagaaactcacatggactgggtacctgagggtgactggggtttctcaagttagtaaagtggtaaaatcaaataatcaacaaaaagaaaacaagagagaggcagcaacattgcctattggtgtggaggggtagacagtgagtgtttacctgccttgtggtggcaggtgaggcgggcagaggggacatggagggtacagagccttgaatttcaggctatggaatttcaggctatggagcttggactttaaatcatacaaagtttctgtttttggcttctccttctctcactcctttctcctgtctttttgctattattcatgtattttaatttaagatagggtctcagtacgtgatcctggctgttgtggagcttactatgtaggctggccttgaactcacagagatctgttgccccccccccccaattaagggtttgtgctgtacacctgactcctttctcttttctttgaggcagggtgtctccaaagttcaggctgcctgggacacagtgttctctaggtccgcttgcttcctagtgctggagttacagaattgtgctgccctgccaggctgccatgggaagagtctatttaaggcatattctggttagaactcagtgaccatgaagactctagttttaaggggagagactagaggatggggactagttagtaaattgttaaaatagtttaagtgatggtaacaatatgaactatagcattgataaagagtaagaatccaatctaaggactgccctctgctccccctccctttctctccccttttccctgttccctccctccctcccctccctccctccctccctccctctcctccctccctccctccctccctccttcccttgagtttaattagagttgctgcattagtataggtatgggtttgttactggtatgtgtataacttaccaatgactaaacttgtgaactcttcctaatgaccaagctttgagaatagtccccgctgttgaagagaagaggctagaggagctgcccaagatgagaggatgtagaagccactgagggagggatttctggggccagattctgaagtgccagggagacgtgagagtctggctgaatgaagaacacagaaccaagtactggtttaagtgctggatgtgccatgcagagttagtggcagcagccattcggaggagaaggagggctagcttagcaatagagccatgtgaggtgacttgagatgtgtggtgggcagttcaaataattatgtaccaagttctgccagggagccattagcatggagaatgatgcttaaagtggaccattcaggcttgacatggacatctgcagtcccactcagtcctcagctaaaattcactaacaactaccaaaggcagcaagacaggctgctttctgggccctgagttaaaaggaaagaacctcatgtgaaactgactggtgtttatcttctcaccaagagggcagaaattctgatgaaagaaacagactttcatttcttaaactgttgacctgaagaaatgctttcaaaagcacatgtaacataatgtaaggataccaatttaatataaatatacaatcaaacatatatgtgtgtgcatgcatgtgtgtatatttgtgtatgtgtatatgcatgtgcgactgtgtgtgtgtgtgtatgtatagacagggtctgcctctgctgtcaggctctccagaaactcccggtggcagtgatccccctggagcagcctctagagtagctgggtcaatgggcatatgccaccacactcttccatgacttttttttttaatgcttttttttctttttacaaaatctgcacaaggcattaattttaagttatgaaaaggtatagttataagttcagcctctatgtattgtggtgactgagaacaggagccctaccaggtagttgtgagggctggggattggtaagaatttacaggtgcctgctttatgcccaaccttggattgggagaggagtagcagatcctgggagcattttaaggagggttggaaagcaaatgtctcatcctcattaagccttccctgggagtgtgatgctgttgtgtgggtgtctgtttgccaacttccgtcctcaaccaggagaaatgtgcatttcagttatttttgttgcataaatatctcatttgcctgtctctgtaagagtgaaaccagagctggtaccaccagattgagaacttgcggacagaacttcacatctgtagaaaagtcatcaaggtgctgccagcgatgggggtccctgaaaggtgtacagataacagagtttaggaagagactgaacccaggcgattcctttccttgtcccactgaccagagcatggttttcatgtcatttgtacaggatcttgctttatgtattttttttttaatctctaaagccttcactccattgcaatagtcacacagacacaagatttaaagttgcttagagaatagaatattcacaggggcttttgtctaaccctctgtgatgtaggtattcggtatgttttcggatctccaggggattcacactcacttcctcacagggacaaatgtcagcgactactcacagatacaagaaatggaagtccagggaagtgcgctgaggcagaatggaactgtctgcagctcagtggggactctcccttgattttgcagggagaggccaaccttgaacttttcaggagacccctgttctcgggaaccaggtatgtcctcttctgaggagaacaatcagcctggtaaatgtagaagtaaggctgagggcggagctagtgtgggggtgaacaggtgtgctgcctgtgcgggtaggatgctcagcggggaagtccacagatccttgacactggagcagaagtcagacccatcacactggcaggctgtcagtgctgtctgagtcttcagtggctacctttcacgtaaattaactcctttaatcaacatttctgccctacctgttgagggtctatgaaaaggttaagctaatttaaatattaaccccagtaaaacagttagaacaggcctgtgtgttcagtaatctttcgtaccccaaagatgaatagaatttattattatttttaattataccctgcaatttttcttctctcttggcatggggaatcgagaggtccttatcttccctggactgtccataactccttagtaggcattgtaccgttgatggttatttaatggtttaatcagagagggctggttgtgatgaggcaatgagaactggcatttaacaagttaattggaattggagagagctattaaaaggctatgcaaggtcttttatgaaactcttgaatttgcttcagtctgaagatcttattaaattatgctaagggtgtattttcctttcactgtaaatcacccattaggatcatctaatcagcttcctcaaagttgttgcagatggaagtattattagcctcataatgctagaatttctatttttttctcaattgttactgaatctatgccaaatactgtatattttcttagcccattgagacgaaccagaattgatttataaaatttcctttcatgtcattttagtttcaaacataattactcgagacgttggtgacggacaatgtctgtcaccttactcatttgatccattggtgttgaaggcgtggtctgctcttttctgaacagacagtgccaatgtgctgtgttcatgtgtcagtcactcgaaaatagcatctcaccaccaagaagcagatggagatggctggatcccattgtgcctctactaatgacccagagatctgtttatttcacagccatatgtggggcacaataattgtttcaaaaataaatattgtatggactgctattcttagggagtagttctcctgccaggccccaggcagactgttttctatggccttttgttctcagctcaccagacccatataaattcatcctggaactggaggactctctaaggtgtccacagattctaactggatagaggatgctgacagcaaagaaaatcaaagaacattttgtgtcttttgtggctagaagttgtacttttctttactcagaggtagagcaaaaaacctctttgccaaacagctgcactggaaacgtgtttttgcatgcacttacatgtaaggctcaaagggttttgcatgcataactgcatatattgtctccattgccataattatgtcttttgaaagctatgtatattaaaaattttataattgaaacacctctttcataggacaaggaacactttctaaagaaatccaatgccatatcctgacataattttttcatataatgtttagaatgacattaaaaatcacatatgtaaaataacacctatcccgttccccccttttgtgaaggacttcttgagaattaaaaccagggaagtcactatatcgctgagctcaactctcagaattatcattgagaggaagggtctaggtaacttgttcatgttgactgatgactctcctacctactccagcctcccaagtggctgggatcgcagcctgccgttattttgttgactaagttgagctaggggtagggcatccatttctctacatcctgctgatgtgacaggtgcttgtcacatgtgatgggggcagcaagcagattgtgtatcaaagtggcctgactactcagggaacactgctgtctcccaatgggactgctggctgggaactgggtagggaaggatggaggtagggtttgtgcattccagtgtttgtcctatttcttgttacaaactaatccttcacaaatgtaaagggtttggattgaagagactccagttcctgaagagaaaatataaggagatcaaaataaagtttcttggtttgaaaaaatattggttttccaaataattaagtattccagaagtgaatagttcataatgagggaatgtttataggtgggggggggagggggactaaattggatgtcagtgtctcatacttagtactctccttacgtttctgggttatgtacgagaagatgaatcaaagcctgaagacttggaggagaagggcccgagcactagaaacattagagaagtccatccttcctgctgttgaggagatgggcagaccatccggcagctgttacaagtgtccctgtgtaagctgtacttgttgtgggataattggacatggagttaagattatgaacatttctaagaatggcagatccctttgttaagcaaaagccagctgctgtctgtttcagataaaccatccacttagccaatatttaccagctcactggaaactaagggtcagacttgtaactttttgtacttttgtttggtgtttgtggaccaattcttgagtactcacattaatcaggctctgcaaacatttcattctgagtcccgtggagcaaagattatagcttttagaaggtttccctctcaggtccttcatccttcctgctgttacaagctaccgggagcattgtgcatcttgtttctgtttattccgttgtacttttgccagtgaagaagtctggacaagggtaataatgaactgtctgcaccgagcttttgtctgctccaaccctgcccactggcaggagtagtccagggttcagtagttcacattgtctgtttgcttcaagtttggggaacaaagcaaattgtagacacagaacaagaactgggtacttgaactgataggagtccacatgccagtgggtaactatcagtagtcagctaaactacaaagcataaaaattgttctcgcttttatttattaacgcgtgtttggcacatgcctgtgcatgccaagaacgtgttgagttcggatgacacatttgtaggagtcagttcttgccttctaccgtttagtctccaagaattgagcccactgagccatctcattggctaacaccttctctcttaattctttttcctaaacagacaatcctagtgctgacttttcggctgcagagaaagtgctaactgatatgcgtcctagttatattaactttagccccacagaattacattaacagtattcatagggcaaaatactttatggaatcccataagtattgacgatcatagcagtgcagttggagataggtgcttttgttgcatggctatcttttaaaagggggatttaaatcatgggctctggaacatggaatagcaatggaattgaaaacaatgttttggctatttccccttttaggggagctgctgggctgtgcagcttggtttaggtttgactgatttgctggtgggtttgatgccaccagctgcatttacttatgttttttcctgattctttcctattgatgctgctggatcaagttcagatgtccagctttggcacagccttctttaactcctttaggctggacatgttgtcccagtgtgggctcccactgtgacttatgcttaattaatccatatgtggagtcctgtaccacactgtgtgcggctgcgtctgacccttgcttgtactttgtacagccaagcatctagcatctagtgtaaattcagtaagaatttattaaatgggtgattgcattgctgaatcctacagaagaatcggaggtaaaaatgactctaagggtctttcccctagtcattatcacttctatttttgtaaatcctttctattaaggaaagacatgtaaagctgtcagcacgcccaatgtataagaagaggcggtttagtgtaggaaagaaatgacaatattgtgtgtgagtgacagcatgatgtgtgtggggctttggaagcccgtgcagtcacatgcagtcaagcccacggagccaaaggagactgttggagaacacggagtcaagtgaaagacgaccattggctgtgtgtggaaagggcaccggtgacaggcgtgacagagaagccaagagcgacatcaattcagactgcaggtcctagagcctgaggagaggagtgtgtaactaaagcagggaggtcactgtggcatggaggagccctgccagtaagaagctctgaggtaatagttaatactgtagagattaatgtttgtttaaaattttttatattaaatatgaagatagcatataaggtccacagttcacatttctagtgtggaattcacaccaagatggtcatccatgcctcttgactttttgttttattttattttattttgagacagggtttctctgtgtaacagccctggctgtactggaactctcactgtagaccaggctggcctcaaactcacagagctctgcctggctctgccttcagagtgctgggattaaagtgtgtgctttgactcctttttttttttcttaacactatgagtttacacttttctaagaatatttaggattcccaatgaagcctgtttcatatgcagaatgatgactaaatcccttgggtgtgttttaaaaggacagtgtgcagtagaaatgccaaagcatacattatacgtattctccttgaccatctgagacaccagtcacagttagccctgaagctccacttcctagaatgaccccggcttgcattcaggtcctggctgccaacaaggttccatttggaaaagagatgccatgtcctctagctccacacacgttaaatgggtggccctcagctgtggctgagtgactcggcactgctgtggcatggactcccagggatggtctttttttttggaaatggcttttccttgttttaggacctgtgggtacccttgcaagggctttgtagacatctctcgtgcccttcacacacaccttcatagattgcttctgtgcctttgctagtttttgtcagtattccagattcctgaccttagggcttgtaaaccaagtttgttatcttaaccttaacacaattagatagtccttcaatagtattccagaggtttcaaggaaaccggaagaaaaggaataggggaaatgggctggacctttctgggccctgtcactgggaaatactgagaaagacatgttctccccacccatatttctcccaacctctactatgtaaacgccactactttcagacataggtctcagcagagcttcagggaatgtctgagcaatttggaaggtgacaggatatagaccttgtgtttacaccactgcagccaaggatcccgttccttccagttccttccacagacaagcaggataatcagatgcctggcttcctgggcacacagagaaatgcacgctgaaatcgtgagcaggtaaaacagaaatgcttttggaaactgaaagtttcaacaagagccaaagagcatttaatgaatgtttaaacgatcatttttctgggaagtcctaaggaacagtttaaatgatgcttgactagaaatagatagattggatgatacccgttccaaaataactgtctgcatctaaaattatgcagttaaaagaaccacagtaacacaaagcgccatctatatacatggagactacaatccataggtctgcagttttgagtgtgtgtttgtatgaggaagaatatgctagtaaaggcaatcattatgcatgaaaaattttgataatgaagtaaaataataactcacacaatagttaaaggatctgaaggctctttaactagatatgtattagagtcctttgtagtggcgtcttgctttgccagtgaacttgcggtggttgccacatcctagggacatggtttcaggtgtgcagatgtgacaccttataaggaagaggaggggctggctgtctctctcgggttgtggtgagagcattggcagggcagagacggcatcctctggagcaggaagactgcagtggttatttactattatctgtgtaagtgcttccctaataaatacacaattatcatttatcctgggtcctatggactcatttaaacctcgccttcagcccttctgaatacaatgtgtcttatatatgtagacatgcacacatatgtattcatgaacagaagcatgggacttctattgataagacctataagttttctggatttattaaaatattagatataaaggaagcatattacttatatgttaaaattcccaaatagtttatattattaccagaaacaaaaataagcaacaatcaaatccctgacagctatttttaaggtaaaatttaattagactattttgtggaatttcccttatttaacttttatgtcaaaagtagtgtggagtggagaactgttaaaaagagaatgtcggtatgtgagtccctgtcctgtgcttcagttccatgttcacattgccatgttgaatacagacagggcttttctagtgctactgtgtttaaacttataatcatggcactattggaattctaccttgcaaatgctgtttgtcttttgttaaaatttaaaaaggaaaaggtacaagcagattctgccaagttgtatttccagatgaagttgataattatttttcagataaaaaaattgccatcttggcagacacacatttttcagaaagaatgcatttgtcttacattgttttctgttgctgtcataaaacacttgaggctgggtactttaactcacagttgtagggccccagggatatctgcttggctctggtgagggtcaaatggtcattggatcttgtgcaagagggcagagtgttgtgtgttagagggaccaagagtgatgaaatgggaaggaagagactagggagggtctagtccatccttggtgtaacagtccctgggatctaatctcccatgagatacattaatgtattcataaagtggagccctcaggatctgatatccatcaccagatcccgtttcttaaaattccattatttgtccaggcactggtggtgcacacctttaatcccagcactcaggagaaagaggcagttgggatctttgtgagttcgaggccagcctggcctacaaatcgagtgtcgggacagccagagcttttacatggagaaaccctgtcttgaaacccctgttagagaccatactacctgcacatgggccctcgctggcagcattagaatcgtttgggttctagggcttgaaactggatccttggtttgctgggcaagcaccatgttggacagtaaacaccacatcccagccctgcagtaagtgtacatagcaaaaaagatggctgcttaaactctcttccccttcataagagctgctgcattctcttttcttaccgttgttctcccatttcttgaaagggagaaaaacaactgctaaagcccagagatgttctttctcatcattcaacaagctcctcttgactgatgggtgaccaagcttattatctagttggaaaagaaagatgttgggtagatgtgtttttaaagtagcaataaacgcctctttcttcccttactgcaagaatggcagggtggatgttggaatagtccaatggttttgttgatttgctagaatttgagggaattcatgaccatttattgtgtttgctctgaactgtgcaaaggatgcttttctgctaggtatagcatgaggaatagagcatttgagtttgtggagtcaggaaggtcagaaatgttcaccagagaatgaggagcttagcctctgacacagtaagggagctaagagaggtgtgcatggctgccctgtgctgctgagatctgtctgtgaacctcccaagcttcactcaggagtctggcctccggcagggaaataatgtattctgagaaacactcgctctgcagtcttatgtaggagtgcatagcgagcgtctctctggtcattcagttactatatttagtctggaaaatatgcaggagacttatccttttgcaaaagcattttgcagacaagatttttcaatagcttcttcaatcatctaagctggcaaaactggttaagattgatagtgtgtgcagcacagaaaacactgttacagaagagagaatgactgtgtgttgtagctcagcggtagagtgcatggcaggcagaagtccctgctgtagctcagcagcagagtgcatggggggcaggagaccaggtctcatgcctcagtgctggggagagagggatggaaaaagggataaaaaagcatgtaggaagtgctggtgctggcttctgacccattcttcagaacctgggtaggtttgggttccccttgaagttttgtttgtcctagtgctcctagaaccacagtcttagagtggtggtcttgggaataggagccagcaagcttcctagtgtccattccttgaggccttaaccaggagcagtgtggtgacttaacagaacttgtcactgttgcctaagccaatcattagctaacagaaaatttggatcatgatgttgagcggagcatttgcttgtgttcagttgtgaccacagatggaaaaatcaatggcctggctcttaggctacgtgtttggcatgctcctgttatagcagactgtatatcattctgtgtagtgcatgtgtactggttactctgtgttctgtagaatccttattgattttatacgtgccctaatttttatttctatcaaattagatcttgtgcccacacacaagcatagcttactgtcatagcacacatgactcaaagtggatgaaaccgaagactttggatacatttgagagccctgtgtgtagttgcaaagacaatatattaaattacttttgttttggaaacatatgcaactccctttttgtgtataggagctaacggtaaagacaggaacacagagctacaagcgaacagtgcttttggcattttcccaggccacgggagagggggaaagaagtctcctcagtgtttctacagggtgagatcacattccttctgcaagcttgatgttcacggcagttctgctgtgttcagtgtgttgtactgaatatgccattatcccacccagcacaagatgtccagtttacaggatgaattaatcccaggggtgggggttataagcattttattctttttgcatgtttctcttatagttttgtctcagggcctaaagcatgtcactgtctttcttcctccttgttctggtttgtaaatgtgcagtcctgtcctgtcattcttttgccgctgacctcagtttccatgccttcacgtgctgtgtagtaagtaacaagcctcaagatgtacttaaggtgtgtatttgtggcatcctgacctgtgcagatttgttccttcttctttgagaatatgcatctgcaccctacggtaattagtctcttgtgtaagcacacttccaggcagctcaggctgaaagccagtcttggatgaatagagacaccgattatcaaacagacgcaaaatcagccagccacagtgatggttttgtaaacctacagacaacccctgtccttttaggttctctaacaagcactgtgtaaggaaagattgaagcagacacagcagcgtttcagctgctgagcatagctcagttacagttgattgatgaaaatccatatgggttccatcatagtgttaagcccagggtgctttaaagaaagcatgctaccgtagggtgtccatataatgaattatccaagccagaatacctggaggacaaaagggagagctgggagtaactgtgctcaggtaagtgataaagattgggcatccccaatctaggcaaattggattcatggttcatgtagctaggttctcataccctgttcatgaaaaggcaaaggcgattttgtactgctcatatacctgcttatcatttcaccaggggaaaattgtttccattatctgcagtgtaaatgaacagatcttttagggttgaccagaaacaagatattgaaaacctttttgtagcgtgggggaagcagatagctttctcctgctcatgttggcttcgtagctgagactgctctgtcaggcagtttaacaagaggaaagcatatagatttatttgttttatgtgactcgggagctgcgaagagcattcattagacatgagtggtttttgtagtagtgttgatggagagtggacagtcatggagaaatatggttgggcggagggtcccgaggtaaatggaatgagcacagctctttgctgatgtcccttgtgccttgtgcctttggagaaaaggatgctctttttgcttgtggggagggcacatctcacatggcggtcttttgacctgcttcaaggaaaggctgtaaaatccttgctgtgatttatgacctgtttagggagaagggtgtggtggggaaatcaaagtcaccttccagcttctacagatttcctcaaatcccttcatcttaaaatagccatatgctggagcagcgtgtcccaacccctgttggtagctgtccctggcttggctggatgtgattggagcttatcagatgatgaatagcctggagaagtccttcttgagggcactggtgcccagaggataagaactgaaaccaactaaagcacacaggaaacgtgcccatagtgaggtatttaaaattcactactggaagtgtaacagtgcctttgttggagataaaactttttttcatgaagatgttttaggatccctggatttaaagccattaagaggaaaacacaggtagatgaggaattcactgtttatttgtgctctttttatgtgttcttgtgagtattctaaacataaaatattaatgttcacctttatggttaaagtagtgtgttctaaagaatatggataatggctgatgatttgtaattatttattagactttctaaactaaataattcaaggtggcactgggggatcaataatcagcctcctgaaaattgaataatgcaatcaatttgtatttcttttgttgctactgatggagccacaatgtttaactttcccttgtactgcaggcatctaaaaggaaaacatattaaaacattaaggtagaaaagtatatctatattttacatatttttatttatttttatttaatgtgcattggtgttttgcttgcatgtatgtttgtgtgagggtgtgtggtccctggaactggagttatagcagtagtgagctgccctgagggtgctgggaattgaacccagatcctctggaagtgtggccagtgctcttaaccactgagccatctccccagccctagaaaagtatggtttaatagggtaaagtataattctcatgtaactttgtgtcatgaatttaatacaatgaataagaaaattagtagcatgataaaactgactcccaggaaattccagggatattcccatagaatgctgggataaggttggaggattagtaaactgcttaatttctcagggcaacaaaactgaactggacttctctttccaccacataagtttcacttatatccttgtggatataaatctacaggttaacattgtaatttagcagccctgacagatgactaacagcaagctctgaaaccaaatcttggattgggagtgtaacatggaaagcatatagaggtgtgtgcggttttctttttaaaacctattccccaattttcgtaacaaaggtttaggtttggctttttttttttttatgttgaatcatgtgattcttaagctgttatgaaattgcaacctttgtctgtatactgtgtgctttgtttgcctgttaatttgtttggcttatagaggatcttggggtccactaaaggaggggtctgtagttatggctgtctgagaagtaagcaagaccagatgtcttttgattggcgcttttatcctgtgcaaagggagctttctaagagtcccagcactcagttcagcctctaggtcaccctgaaaaaaaatgtatagcacatgtagttaaaatttttattttttttttaagcagagagaacaataagtccacttcttgagctagcacactagtaattaaaaaaataaaagttagggcaaaaagaaagcagtcctatgtttgtacatatacttattatgtgcagaaattattaattaaaaaaaaagatgtatttacctttagtgtatgagtgcttgcctgtatgtaaacatgtgtcacatgtgtatagtgactatggagaccaaacaagggcattgggttccctagaactggagataccaatggttgtcgggtgccatgtgggtgctgggaactgaacccaggtcttctgctagaacagcatgtgctcttagccccgggccatctctcctgtaccctgtatcatcatcatcttcttttgttaagagctgtttttttattattattttttagattccaatcccagttcctcctccctcctctcctccagctcccccccccactccacttcccatctgctcctctgagagggtaaggcctcccctaggaagtctactaggtctgtcccatcaccttgttgaggcaggaccaaggcccctttccactcccacacccctccctgtatcttcttttgaagctcagaagagaggggctttcttaccagtagtcttttggatctcaagatttaggctttgttactttaaaaagtaacaaaattgtttccaagcagaagccaactgactatatagatgacatttctccttcatcacagccaaggtcataggaattaagctgttcacattttctgtgtggtgggttgcactgatagcatgttctaatcaaacaaattggtaactcatttgcattggtgatggacttctttggagaagttttgcttctgactgacatgcactaattaccctttgtcaagtagctacacagtcccaaaataggctgtgtgactattgaaagttgatttatcatacattctgcaactagtcttgaccatccattgtttgtcagatgttgtagattgcagggaggcaacaaggaggagcatagtaaaaaaaaacatccttgtccttacagtgttcatgctcttgtcgggaagattataaactgatgtaaataaaatactatgcttcatttgcaggaatacattgaacttggacaccaaatttaacatatcttaagtagctcaccttttgtgtagaaagaggggggaaaactccttagaaatctttctcttctcataggtagtagtttttatttttatgttttgtttttcttatgcattctgcagtggatttcttatgcattacttagtggacttttcctataaagacgaggttggccaaaaacataaatttaagagttaatgaagaaagcaaaagataaatttaggcatctcaagtaaagggttagggttaggataatgaaagatgagtttttgtaagcactattgatgttgaaagtgcccccccacaccaagttcagatgttaaagggctcctgtctctcatactgatttttttatcctttatcttgactctctttgcctctcattgttttgtcattatttgagcacagacagttgtttgtgagtttagagatcacattctgtgaccaataaagaccatttaaaattaacagcaacatttataataaattggagacatagaccgggcatggtggcgcatgcctttaatcccagcacttgggaagcagaggcaggcagatctctgtgagtttggggccagcctggtctaccaggtaaattccaggacagccagggttgttacacaaagaaaccctgcctcaaaattatagcctccccccacaaaactgaagaccccttaggcacccttaaaaagtacagtttgaacaactctaaagctttagttgggttttagaaatctcatgacttgggtaatatcttatctagaagtttagaaatatcactcatccaacagtcctgtcatgtccagaagtcattgtttctcgcttctgccctgcaacttgtagattttgcaatgcttctgtctcctcttccacaatagtgctgaagcctcaggagggggtgatatacatgtcccatctggggctcagcactctactgacacttacgctctacactttgaccagttgagagtttctgcattaatcactgtctattacccaaaggaacctctccaatgagggctgagagctaagtgtatagagattcaagtttaaagggtaacttaacactatgtccatttaacagaataattgtaggagatttacccttggagcctgtgagcttcacagctgtggaccagacattcttttcctcccagggagtgtatcataaatccaatcagaaatcgtttggctgttggttactcccatagcatttgtaccactattgcccaatgggcagatcttgccctgtcagtcattattgtagttcatagccgggtaaggttattgatggctttcttttccccagaagcctacatagcaccttctggtattatgaaaggtaggcagcagggaagataccttctagtcactatcaacttgatttctctgtgtcctctgaccaaagtgtgtgatgtcatcgacaataaaggtgtaccatcaaggatggcaatagcctgcatggttttgggagtctccagtttgtccctgactaacaacttgagaatgatatcccacacctggcaactgaggggctattgacagttgatgactttggagagaggaggaatcatttttctataagggcatggctccctgtaggttgagtaggttgaccatgctcgggtagattgctccaaacacatgagtagatatggttagcctgaactgaaagggtgtgaaattagaaggtgatttgtaagtagggggtagatcttggagaaattagggggaggaatgagggtaaatatgatcaaaatacattgtataattgcatgagattttgaaagaattaagaaagttcagaaagactttcatggcagagcagagaaggtagtggtcacaagagtggatgagtgctaaataaagcagggtggcccattcctgctgagcttccctgtgagcttgaagccagaagcattgccttaaggtgccatagtttacacttttctccaagtttggggaagtccaatgatgttttgaaacaatatttttctgtccttcctgtctttattttcttcctgggactccacttatgcacatgttacaatttccaatattgatttgaggtcacttagatttttaaaaatcttattctctactcacactggcttactttatttgctttatgttatttctaacctgatagtaaactgtccaatgaagtattttaagttgtacacagggcagtttatggttttagaactttccttttggtattttgtcattctcaagtataagcatttcctttccttgcatattaatgaaagctgactaaagtcatctttatttaattttgcaaaccctggtcttttggggttgatctccattgcttgcttttttgttttttttgaatcagtcctctattcattttttttaaaaataagtttaccaatttgggcttttgttcagaatatcttaaaggttttgtgggtttctgggttctattgaatttttctaaaaaagtctggatttctgtttgctttaacaagctcctaagtcaatgcatttgtgctccgagcacagccatccgatgaaggacagcagtatggttgctcttcagatattttagcctgggacccttggtatcttccgagtgcatgtacttttcacaggtcacctagagatgtaggctcagcctatgttctaaggtcagtttcttcaagacatgaaactacccattatttgtcccaagttttacttgccacaactggctcagctggaaagtttctggcttctgcaaaaatcaaaaaagccaccagtggttaatttggattgtcaatttgactgggctgcagatgccctcagagttatgaaagaatgtgctgttgacttcccagcacctctctgagaagtggatgggggtgggaagtggggacttgggaggccagaagaaggggagggaaggggaaccgggtttggtatgtaatatgaaaaacaattttaaataaaagattatagaaagaatatgcataggtgttatgtgtgagcattttcagggaagatgtcagcccacgagtggtgaccctctgaacgtgcatggcaccatccaataacaggcggtgatcctaaatgaaatcgaaagaggaacgaggattcgctggctctcctctctgctttcttctgtgtcctgacaccccagttccccctccacacacacacacacacacacacacttacacagttcagatcctattgagaaccttgatgaatacatctacggagagggggggttccatttattttacattctgactttcctccagtttctgcttgccttggattgctctctgtgttatgtcaagatagtgttttctgtttttgtttgtttgtttaatctagaatttatagttgttctgtgtggaagaagtaaattcgccattaccagaggttctttggagcttgtaggataaatctacagtttttgtgttcacctccagcccctttgggagagccaggaaagggaagataacttttcttcttctttcttaagttacaaagcttatttttccagaattagcctatggattcttcgatgtacttttcaaacagatgctttgtgactagggacctcttctttgcttgctactatcctaatagatatccctcttgtttttgttacattagacaacatcagtttaccttttgttaaactttgtttctttcttcttggcaaattgtacctgggataagatctcataccactgggcccaggacctgaaggactgtttctttgctacttagtaatcaccacttaagttcacaatgggatataagtaatctgaaattgttatttttatgcatatgagtattttgcctgtgtgtatttctgaacaccacatgcttgcagtgccaatggaagccaggagagcacatcagattccctaggaacttgagttatagacggttgtggaaggccatgcaggtgctgggaactcaaccagggttctctgcaagagcagaaaatgggcctaactggagagctgtctctttagccataatctttggacatttaaaactgtttttaattgtaaacataatgtgcaccgtgcccccatgttcaggccccagtaatatcttagcatttgcacatacacaaacacatttctttatggagacaggaaacatctcggaccaagctaatatgtcatttggtctctccctccctcacccttcttcatctgtgtttaggatcccgtatagtacagaccggctttgaactcaccatgcagcaaactggtcttaactcttgatccttttcctccacttctcaagtggtggggttacaagtgtgcaccaccttgttgacccttgtgtctactcattctttcttcatctctccttgatacacacacacacacacacacacacacacacacacacacacacacacacacagcacagcatccttatttttacatactgtcatacctgagttgtttttccacgttcattgtattctggctgactgcaccggacattctatactccaaaccttctgctgacagcagttaatgtatcctgttgtaatctccttaggaaatccttcaaccagtatttctaattgaaccagtaaagccttgttgtttttgagcctgcgtatttgaaatttgtgataattaggccaagaagaaacttaaaatttatggctgccatttaatgactttgaaggatattttttcctgagagataaatagctttaaaacatcagtttaaaacgtaccagttacacataaatttttgtctgcttttcattacctaataaagaagaagtttgttctgcccactctgtgcattcagaagcaataaaaggtacgtgccattaaaataattctttgccagatttgtctctaatgagggctctgctcatgtgacccaagaacgactgttcttttcccaactgttctgttgcccttcaccacctccctttgtcccattgttccactgctaaggtccctgcatttacttcttttggaggggccgctccttgagtgaggatccctgggtgctcctgagaagggaaaccagctaggggcgttgccttcttttcatccttttgggtgtcatttttcaaacagcacagtgggaacgaataaagattgtgcctaaacactgataaccaaagcctgttagtttgaagtggatgcattttagaaagtctcttgcagatcactctagaaatgcccgatgtgtttctggctaaccaccaacagaggtatatctcgtcctgatagatagatattagacaacactggctgttttctttctttgagaattcaagtcacttgcattgtgtttcctcaccctctggaaagagatgtgtcatgagctcagcctcggatggatagagcaggtgcagggagaaactccccaagagtaccatgggttagaaagcaccagcttgggatggctagtgtcggtgcccctcctcagagctctgtgactccacatgtcctcattcctctcagcctcaaaggctcctcaagtctgggttagctttctcacccttgggtgtgatcgaggaaaggaccctggagatctgcttcctttcccagtggaggccacatagagtgagggtgtaggggtgtgatggtacccgaggctggccttgactctgcccacctgagacttcctgggaggaatcaaagcacttcctgcctcctttgaaccccaaggtactttagccttccctttagatggagtaatgacacaggactgtttctccttcaggaaaagagcctgcagatgacgtcgaattcctgagcagaggcgacgtagagggttaggatagagatgccttggagagcagcacagtggctggtgtatagcccaggggtagacagccgagattcagtccccagaacttcaaaaaaaagtttaaaaagtccttttacattagctttgtttcctgatttggcattgtatttcttagttcagtttataaagattagataaatacaaaaaaaaaaaattcctttaggtacttatctgtatttagtttctggtaagttttttggtcttctctgcttggtgtggttcattggcaaaacaaacacggggtatctggagttagcagactaacaggcctgctgaggggtttgttgatctaatgcagggctgtgttttgtcttacttgaaatgagttgaatactacagacaagttgaaggtgtgtggcatgaacctctccttactatgaaaatttcacattgttggcaggctctcagttcatctcctcctcctcctcctcctcctcctcctcctcctctcctcttcctccccctcctcctcctcttcctggtgctgggggtgggattcagggccttgcatgtgagaggtgaacactgtcagtactttggctcacctccttattgtgttcttcttggtataacagtaacatgctgtgggacacatccaatacgggcacactctgcctgccatgcattcccgggggttgacccagagcaggctagtggctgggtgagctttagcttggtgtttttgtgcttcctgcatccttgctggcccctttcccatcaactcctcctcctgaccattgcttgggtcgtcagatgtaaggcctaagcagttagttctgcgttgttgtttcttgtttttcttttcggattatatcaactgagattttgttttgaaggaagttatagcacccagaattgaggggactaccttgtccactttcagtgaaggcagctgtaaatggcagctttgtactggctggccaatctctttttgctgacctgtagtttaattaccaatgtctagacttgatagtctgaatttaaacacaagacataaacagcatcatctggaacttatttttcccacactaaacacttctttctgatattcgtttccaggaggctccttcccccaaccacacctccagatgaaaatcatttaattaaccgagcgagacttagctgaactcaattgcggtcctcaacaatcacacgttctggattggtttaggtttcgagtgacaagccagttgcaaaccacagactcatgctccgagatctgccacaaggtctcttgctccacccaaatgcgatggagcttgtttctttctcagtctcacaggccagagactctgggtgtgtggcctctctaattacctgtggttttcctgtctggtgacaaaggctgagctgggcctctcctggggatgtcccacagacaggagtgcgagcccctgctatcagactcccccctccaatttgttgtatgtgtctgctcttcgttcaaacaaaatattatagtccacataaataagctgtttatgcagttatgtgtttagtgacactcctctcagccccctgttagattcaagccccggatcacgttagccttggctttggtgcagtgttctgcttacctcctgagccctaggctgtggggtggtggaagagcttccgttatttgtaccaggaggtgcaagtctgcagagctgttgctgagaggagtaggaagctccacactttaactcataaggtgataaaacccagatgccttccccaactcagatgccttccccagctggcacctttctcccaactccactctcagaaactcaactttttatcttctagtccaggagtcgggtctaagaggaggacgggagagggagtgtgaggctgaatagatgccctgcttacttgccaatcagatagttccagccccaaatagtgttctaattaggaacgatattaccccctccctcaccaggggtctgcagagacaggtacattgtattttaacactgaaacagagttttttttcccccccttttatcaccagggataattaggatctccttgatatctacaaggccccttgtttttctaactcagggctgaactgtaccatcttcatctagctgttaaagtgatttcgtaaatgacgctaccagctcctaatttagcagaacttttatagagtctaaaagggtactagtcgaaggcctatttgtgctgaaataaagtacggagttgtcctgcactctcctatcccagactttaattataaactcacaatcacaccagatagtaacccttaaatattttagcattttcccagcaggagacagcagcacataaaccagcaggcaattagactgagagatttatttctcactgacccaggaagcagagcctcagttcggagaagatgcaggctgccctgccctcctcgagggcgctaatgaattagcataaatacctgtagtgagttaagtacacttgatgggacagtcgacaaaggaaggagagccttggacagttgagcttttgaagtgttgggtctggaaagtgtgatttggagttgagctcggctttattgagcatttcccgtagtgctctctactcttcctcctgtttcagtctgtgtctgcttagaagcagtggaagttttaggacatggatttccaaagatttaccattgtagtatttggtaaaaaatgttttgaagaggggacatcttatggttctttagttaaaagtttttgctaccaagcctcatgacccatctgatccctgggacccattgagtggaacgagagaaccaggtctccaaagttgtcctgtcacctccacactctggcccacacccacacacgaaagaataagtaaatgcagtcctcgtgcaatgacttaaattaaaaagatggtgtaaaacatgaaaagagtaattcttaaactatgtcaaagaacagttttcagatgtttttcaaagtttcttgtttatgttcaaatcgttgagaagttagttacaaattgctccttcaaggctggagagatggctcagtggttgagaacactgcaaacaagctgtgtttgcagaagacctgaattcagttctcatcaccactgggtggttcacaactgtctttaactccaactccaggagatctgatgccctcttctggcctctgcagacactgaagtcatgtgtgcaaacccatagtcagacatacacacataataacacacacacacacacacacacacacacacacacacacacacacacactcttaaacctgctcattcatttaaatacaactttttaaggacattcctagttacctttttaaaactaaaatatttataattataatgctgaagcatataagccttcgcctttgatagtgcagttctaatgactgtacttgagataaattaaactgaattgtctttagaagctcaaatgtatcatgtgtttgtaggaatgctcattcagcaatccaaattcctttcctgctcttgtggccagatccctcgatataggcaatgttcccgaggaattactagttttggctcaatgtgtagggactcagtgattgataatgaggagtggggtggtcggggtggttcaccagtgtacttcatctccttgaggatcgggaagcagagaggaagggatgaaggcatgtgggtgactttctcctttcctcttttattctatctggttccccagcccatgagatggagctaccatctcatggattcctcttttctcttctgcggatctcttctacaaaccctcacagacttatccccagaggtgtgtctgtctcacatcccagcgtatccataatccagttaaccaccacatctcataattaatatatatatatatatatatatatatatatatatatatgttgagggcttttaaactaaactcaagaaagcaaattaatagcagttattttctgctgttgagtttacagaccagaatggtggtgtctgggaccaccagggttgtcagagtagtgatccaatgaggcaagaaagaaatctagctcaacatgacttggtagcctgcgttggttcaaatttctaacatgtgacagcagcagtttatttttaggtacatttaagtatagtacaatttggggaaatagtttcctgttgtaacacaatcccgtgtgcacgaagaggcataattacatcaaaagacttctcaaagtacatggcacttcttccatgaagatgggttctagagacaggctatgggcctgggcaggatctggtgtcgtcttggtcatgcagataacatagagatcatcttggctaatagccacctctggtcctgattgtaggagcttaggagagccaggcatggcctgaccctattgatagttcaggggtcacctaggctgttagccacctcccttcccagccttctgggcacaacacaggttgtacatcttttccatcaaaaagacaaccctaagtgtttaatatttctggtttcctctgtgctatctgtgaactcagggatctttgtgctctcagtaggattgaggaagaagcaagaagtctgatgttggtaataggtattctggtatgtgcagatgtgtatgtgtatggtgctgggggtaaaaccagggccttggatgagcttggcatggctatctttaattttttttctctttcagaaatctttaagttcttgggagcaggaactttgttttaatcatagtgaattcatcaactttgggatgtagcagtttctccaggggctctcagggaatgctggtcaggaagcgtggtgggaagtacacacaggacttcttgagcatccttacacccaaagaaagtgctgctaattcctcctgtgaatctggtgataatagtgttcagtatttaatgttactttggtcttccttgatggttgactacagaccttcaattcagacaaatgaaggagaccaagaaccaagaagggctggacaatggcataattacaactgcctcagcatccaaagctgggattacaacggagcagggccaaggctcctggatgtctttattgaagggctgtgctgtttctttagctagtgaccatccataataagtttgaactctgagtcatttgctttatgccagcagtttgagtaaagcaaggtaccacgtggacctacttctctgagcctcgttctttactcccgtggagagaatatgtgcacagatgtgtgcccctttattctggctgacttaaaagcagggagttgagctgatgagccagggagaaatactccccctcccccccccgtgtgtgtatgctgtaatgttttcatatatctgagattgtataaaatattttctttaatatatattccgccttgaactagatgaaatctaagctttggaaaaaaaaaaaaaaacaagagaatggcagagagatcagcatgggaggctcagagttcagtgaaagcaagctgagattaaaagttggactagtgtacacagaataggcagtgactataaggtcatgagagcgcgcaacacagttgcttgttagttctcaaacaaagacaatccaaagaggataacaggaacaatgtgtcactcccagtgtctgggccagagctgtctacctctgtagttttccctcctaggctgcaaggtagagctcatagaaccgtgataaaaaatgtgatgttcttcaaatcaatactattcatcacatctggtagtttgttagttactatactagacattgtggacactcaatcgaggtcttgaaaaataccattagattagtgcagccactgtggaaatcggtatggaggccactttaaaaactaaaaatggaattaaccataagataaggctatatcactgctgagcaggtaccacaaggaatctaagtcagcgcatcacagagatacttgctcatccattgctacattgttcacaatagccaggataaagaagtaagccaaatgtccatcagccgataaatgggtagaggaacaggtatatatatgtccaacatagtttcattcagctgtaaggaagaataaaattgtatcatttgcagggaaaaaaaaaaaaaaaaagcctggaaccaggaattactgtgttaagcaaaataagccagatgggcaaatattacatattccctttcatatgtggattaaagaagtgcacatagatgacatggaggtagaagagggctgtaaagggaaggaaggagtgaaagggaacaggaaatagaaagggtgtggttgtttgaatggggcgtcccccataagtcccaggtctttgaatacttggtctcctgttggtggctctttgggggagaattaagaggtgtggttttggtggaggaagctcactgaggactggcttcactgttctgagtgccctctctgcttgctgtttgtgtgctgagatgccaactctcagctgctcttgctgccatgcaggctcctctccagctttcctcctgtgattagcacaggcttttatcccgctggaactttaagctccttctgtaagttggagggtcatggtgtttttaatcacagcaatagaaaccctaactgagacaaaaagccacgggaaaagaaacacatttttacatgatttctctcatgtgtggagcacacacacataaacatatatatgcatatattgcatgaaaaacccaggggggaatctgaggggaggtgaccatcaggaagatggagggaggaatagggaggaaaatggataaacacaatatgataatcattattaatattaattatgactgatggaacacagttaggatgggggtaattcaataacatagactgggaaattgccatctgatagatttcccggaagaggagtaagtacagggccttgtgaaacttaatccagactcagggaggggaacttgtgggaccagttgttatcagtctggttcaggagaggcaggatcaggaaaagcctttgcagtctccagcaagggcaaggcccctggaggactgagtccagagaggagaaacagtggacatcaagtaagatgacagagtcttaactcaagcccacccgatgtcatatctctgtgagttccaggccaacgtggtcgacacgaaatgtttcaggagagctagggctgcattgcaggagtctcagaaaaagttgtgagcgatagtgagaacaaaattaacaccactgctggaagagatgaggcatagttacttctggcaccatcatgttgcagaaaggaattaacatagtaaaggtaaattgttatcattgcaaagggctgtttgcaaggctggtctctggtcaacatctggtgacttcaaatgcaagagcctttcctccagttcatgtcactgtggcttcactgatggtagaaacagcatgtttgtactgcacaaccactgtccttctgggaacctaaaattagacaggggctgcaggggattgaccttcagtaaaacctctaggtccatctgcagctcgcttccctggcttccagcatttcccgagcaaagcacagcagctttctgcaggggttgcagctctcgtggtgacatccctggaaggggacacttgatttctccaagtcttttctcctgctgctcttacattgccggctgtgctcagcattcctgtgatgtaatgaattatggctgtgattttggccatatgttgagtctcataagccatctggacaaatcactggaagtggctgtggtttgtatttctctgccaccgtcccctgcagtagtacctcaggggttaagaacacaggagtagtaattataggacgggagcaaccacatgttctgctttaagttttccaacttagctgcctgtatccctccacctgggtttctttgagttggtatttagttactgactgttgcttataaaattaatttatctggaaaacttttctcccccctcaacatactttcattcatccagccagtcactggttaattgaaattggttaatcatgttaaaggccacagtggtgtttagatatatgagctgagtgttcaaagacatcatcacttcaccgggaagatttgcccctgaaaagcaaaacagtattcatttcagacacgaaatagttctatatgcagatatttttgccattgaggaattacccaacacattcccctattcatggcgagtagtttatgcagttatacaaattatgttacttcaaagtcgatgcaaggcgtttcaggtccgccctcatgtgagctatctgtatcctcctctggtgttaaaacatgtttaaagttaatatatagaacctgctcctctcttggcaaggttccctaaattcagcatgccttctccagctgagtgtgccttgttgtggggagctcggatcattttccgagtaaatgggcttttgaggcagagacccacctcctcgagtgtcagcgaagccctcttcggctggcttttccactgagacacagtgagaggggatgatcttcaagttacccggtcagcatgctgtgcctcgcgtaagagacgtgagcatagtgcctgctgctcccgcctgatgaacagcacaccatttaactaacaaggcatatttgtgttaccctgggaaactaagaagagctttaaaggcttggggctgccaagagtctaaggaagcctcggcgaatggcgttccttaaggagtcaaccccccttgcctcactcagagttttagattctaatggtatggcctatttttttttttttcctccatgaagaaaaacagaaattaacccttcagcatcagtactctggtaaatgtgtcctccggctcaggcagaacactgcagtgtgacagggccccttagccaagtccactcgcattccgtggccaatggatacaggtgttcatttgaaaccacagtttctggatgtttgtttgattgtgcatgttttactgaacctttttgccagcttattggagttgacgtgaagtgccgcacacacatttggtctcaaaggcacacattttgaggtgatacgtgtgttccgagatgcttctggttcccaacattccgctcctgtgtttgttagttatttccatctcttgtgtagtcattaagagtgtgaaggtgtttaagatgtgtatttataatgaaggtgagtccctccgggcagtcaggattcaggtaggaatgaaggagaagcaaggggtaccaagcaggcaccagctacagctcactgcgtaggttggcctttcaacaacacttaaagcaaccttcttggttagcaaagtaacatgggtctcaagtggctggggtggtggggctgaatgcttgcatcccagtgcaggtctaaccctcattctacaacaaggagaaagctatagtgaaaactgccgggagagatgttgggccccagccctcccagggtctctgtgagttgatagccacagatgcatcctgttttctagtcctggattacagcccgggccttgccctgctggcatcaaaaacacgagctcttacacctggggttttcccatataaggctgctccctccctgcaaaaaacacagacggacacacattctcttagcacaagtgaccggatggctcggtttctaattaaatctccaggctttcgcctgatactcggacttagtggtggcatgaatgccacaagtggaggttccattagacttgctagtggcacaggcaccacagaaaaccttgttcaaagtgtgatgcctgaaggagaaattaccatgtcttccaactgagtaatcagtgagggtctgtatagacttattaaaaatgaagtaagagccaatttgtctcttcttctctgattgtgttaatttccaaatgttcaaggaagagttttctgctgttcaggcagcgcggtcccctttttatcatgtagcaaatggtagttaagatatgattgggggaagtaaaactttgtgaagtgtttcctcataaaattgtgtagagctcttaaatcaggggttcaaagtaggacacttacattccctatatcttgtcaaatacaacacagttaaaatagatgtttcttggaatttaaagcaatgtatttggtgatatctggcttagttctatttgttaaaactgccaaattctgagatgataacgtaagtagcttgtactgtgtcttcttttaattttcatattaatgtttaaatgccttctgttccaacataaatggattttgcttaacaaatattgctcataattaggctcttaccagcttaaactggctcctacaagcgtgcaacacacttcttcttcattagtcctcctaattgagttacagaaaatgaaatattattatgccacaaataattgtgtcttatttgcctttttttttgaagcttttcaaaagagcttacggcttggctttctaaacgacaggaattttttcttcagctctatacttcaccccaagtctaacactatttcttgcaacagctgaggtgcatataccagtgttttacagccacttaacttgtattatttctgtatttttactgaagtgcatgtgttttattttctccgatcctgctggcattggaagactgagaaacctgtgccactagtcttggtaaaagcatcacacacacaagatccaaagcccttttcacctgctttcctcctagtgaattcggagctcatcagtgacatggatctgcgtaggtattttgttaattatgggaaacattatctatacattatttttattacacataagaatattcatgcaattttgaaaattttctcgtttttattatatccttaataataaggactttactattttgcaattcatgagctacggcagtagaatgtacaagtttagtgtgtagcctcttacaatgctagctgttatatttggttatcataagcgaccaccaagtttcttcattcaggctttctgaaaggaatcttccaaatggttaggaaagtataaacattttgtttcccagagaagagaaaggcaggggagaaaattaaattcaccaaagataaatgaatcatttattattttataaggtaatgtattactagatgttctggaccaggtctggcttccatccatcatagtttctatcatatgttttttaaaaagacagtttcattggagagattttaggctcacagcaggattgatagggggtagagagctttgaattcattcttggccctgaacattctgtgggttgggaaagatggatattggtcagcagacatcagttgtgattgtgttgtatggagtggcctcactgccctgaacatcctcagtgaccaacctgttgagttttccttccatctgtggttctggcatccaccagccttgtcactgtctccactgttgtctttcacctggcaggtttctccccagactggcttcttttgcttagcaccatgcatataacatttctttctgtcttttcacggtgtcataactcatttcttctcagtgcttattattacagttacctcatctggatgacctatagctgtttatccattcagttactgaagggcatcttgattgtgttcaagtttgggcaaccagggataactatgttataaatattagcctgcaagattctgagtagaaattagttttcagcccattttaggtaagtatgaccagagaaagcccctctgtcatctggcaaaaggatatttaacatttaagagactgctaagtgctagcaagatggctccacggacaaagcagggctgatgacctcagtacaatctgtggatcctctgtgatgagaggagagagttgttctttgactgccacatatttactgtagacatgaacacacagggacacatacaataaataaacacacaagtaaatgtgattttaaaaagaaaatgaaaagtgccaaaatgtcttctgcaggttggctcctcattgcgttataccacattgagggcggctcctgttggccccacctctcaccaagctgggtattgtcaggattctgagatttggctattctaatctgtatgcagtagagtctcatggttgttttaattttcattttgctgatgacatatgatgaagaacatcttctcatgtgcttatttgccatctgtatccattatacatttttaattcaaaaccattaaaactgtaataggttgtaagggagagacagagggaggcctcatctaagtaaaccagctccccacaaactgccttcttcttgctcttgttgtgcacgcagctgtacacttcagcacacagcgattgcaggcagagtttaccagagaaggaagaggctgacgtgtccagagagcttcttgggctttaaggttgtgttaaatgttccggcccatcgtttattgttttaatcacaaaacccctctgtggtagatgaagttatcatcgctatgcacagttgaggaacctgtcagtcacagcactggggtttaggacctgactcagtggctctggactttgtgcccattgtccttactcttggccattgaattaaataatgtgacatgtacaaagacaaatgtttgggaaacactttgcaagagaccctctagcattaatggaaactcatattttccatacagttcctttgactgatcatacccagttctcctgcctttgtctgcctttgcttccccttgtgtttgtagcctgctgaagtcatgcttagaggaagcttttgccatgctggcctgtgaagatctccatccagtcagtgtctgtgaattgagctttattgtttactcagtgaaacataggtaaataaccttgccatgtcaaactcttcattttctggtctgtaaacctgaacacttggtattatggggatggcagataaaattggtgctctgcagctatctattgaaggatgggttttctttcttctctccactcccttttccacctacttctcttggtaaagaaagctagttcacttggcaggatgaagtagggagacagggacaagaggcatcaattatattcctgctaatttgctggtatcttcttttcccctcatcaactttattgagcaataatttcatacaattaaatgaatctatttaattggatgagttttgacagttttatactcccttgaaaccacagtcagaatcactacacagtgcatttccctctctctgtctctctgtctgtctgtctgtctgtctgtctgtctgtctgtctgtctgtctctctctctgtctctctgtctgtctgtctgtctgtctgtctgtctctctctctctctgtctctctctgtctctctctctctgtctctctgtctgtctgtctgtctctctctctctctctctctctctctctctctctctctctctctctctctcacacacacacacacacacacacacacacacacgccactattagggaaaatgatactataacagttgctttgctaaagaatgccactactatgggctaggcaacatagatagcctggatactttgaaagaaggataatctaaagcagagtgggccagtgtgggatgttgttgcactactcagaatcctgtgcaatttagagctaaaacagatctttaaaattaaattctttgttacattttatttatctaccccgtgtgtgtgcatgtgtgcacttgtgtactgccttagcatgcatgtggaggtgagagcatcttgtgggggagttgttccctcatcccatcacataagtcctgggaattgacctcagaatgtcaggctccatggcaggtgccttacccactgaacaatctcattcctgaattgtttatttctggaattgttcatgtaatatttttaggacatagttgactccagttgactgaatcagcagtagggaaaacgacagatgagagaaggcaagtatgtcttttcacctttctttttgcagttcaccctttcctccaaggcccatcccttcattgatctcttttgtcattgtatggtgatttgaggtttatgtaagtgacatcactgtcactctcaaatccaacttctttcacttattgtagtggtctttaggcacatatgtattgttgggtattatttctattactgagcactgttccagtttgaatacatgttgcatttttctattcctattaataggtatgtagtagtagtttctcatagggaccaccagcccccaaataatgatatggagacttattattaattatgaaacttggcctttagcttaggcttgttcccagccagctcttataacttaaattaacctgtttttattaaactatgttctaccatgtggcttttacctctctcccgtctgtatgtctgacttgctctgcatttagctggcatctctcatgtgcctagattttccttcaattcctctctcttcctggaagacccacccattctctcctacatggctattggccattcagctctttattaaaccaatcagaatgtgccttggcaaacacacatcttcacagtgaacagacagattatccctcaacatagtcatttttctaatatttgtgtacaaatctttctgtgaatatatctttgcatttccttcaagggctgagggctatgttataaggtacttatattcacattattttttaaaatgactacctaattttcctgtatttgttcagttttgtggcctcattagtaccttaccaggttcactgcaacctggctgatacttagcattgtcagtctgttaactggcagcatccacctggtgtgtagtgatctttccctgtaattttgaattgtatttctctggtaatgctatagttcagctttttttgtgagctttctgccatttggatattttcttttaaaagttattttttcaggtattctgccatttggtatgatttgccctcatgtcattgaattataagaacccatatcgttaataatatgggttctgcatatctgctacttgctcttttgtttccttcatggtgtctgttgaagacatggttaattttggaaaacaaccatcttaattaatttcttgttttgtagtttctgtgttgacctgtctctgtgtttaaagaaacatatctctctactatgaaaaaggaagacaataatgtaacaagtaaacctagactaccagctcacagatacaggatatgggcaggggcaggctgtatattttggctccgttaattataacctgtttatggtacaaaaggtcccttccatcagttccaacctatagcaacttctcgtggtaccctatcagtttctggttgtttatggtgatattgatgatgtaaccaaatccagatgcctctgacttctttgcatggtgatatcccatgtcacaatgatgtccctctgctgcaaattcagtttcacagcactggctgcagagccaccactgtacagtagtcagaactcagatcatctgtccagttccagagaggagtcacagatgttgaactctgcatccacttgcttttctggacctgttgtctgggtatatggggcaaaggcattgaggtcgggccacagaacctcatgctgtcagcattgcttttgtgagagtgatgcgtttgcatttttcagaggagagcatagttgagtagtgacctgggtgtctgggagattcagagaggcctctttgagaggtctttttaaaattatctatttattttgtttcctgtccatagtttcccctccctcctctcatgtctgtcttcccctcatcccttctgccccacccctatccaccccttctctgttcctgtcaagaaaaggttaggtctcacatggaaaatggcatatcaagtaacactaagcactgcctcttgtattaaggtaacccagtatgaggagtggggtcccacaagccatccaaagagtcagagacagcccctgttcccactgttaggagccccacaagaagaacaagctacacaactgtctcatatacacagatggcttaggtcagtcccatgcaggctccctggttgttgattcagtctcttgtgagccctctaagcccatattagttgattctttaggttttcttttgatgtccttgacccttctgattcctacaatcctttctccttctcttcagcaggattctccagcttagtctaatgtttgactgtgggtctctgcatctgttcccaccagttgctaggtgaagcctctctgatgacagttggactattggactatatctgggtatagcagaatatcattagttaggtatcattacattgacatttctcctctaattgtgtttggttctatcctagggctctgggtcttccagcctctgggtcctggtgctacagcagtgtcagggtatggcctcactctcatggcatggatctcaggttggaccagtcactgcttggccactcccacaatctcacttcaccccaacacatcccatgggcaggacaaattgtaggtcaaaggtcatgtggctgggttaatgtcccaatccctgcaatggtagtcttgcttggttactggagatggccaattcaggctatgtataccctattgctaggagtcttagctggggtcatccttgtagattcctgggagtttccattgcactaggtttctacctgaccctgaaatgacccctttctagtagtctctctcagtgctctcccaccccaccccacctgatccctcatgttctcatccccacccacccccagtccacccaccatatctcttctgtttccactttccagggcaatccaagcatgcccccttgagctctccttgttactagcctctctggatctgtggatggtagcatgattatccttacagttgatatccacttgtgagtgtataccatgttggtctttttgggtctgagatgattttttctagttccatctatttgtctttgattttcatgatgtcattgtttttagcagctgagtaatactccattgtataaatgtaccatattttctttagccattcttcagttgagggacatctaggtttccaggttctggctatcccgaataatgctgctctgaacatagttgagcaagtgtccttgtggtatgattgagcatcccttgggtatagctgggtcttgaggtatatcaattttctcaaaaactggcatattgggtatatcaattcccaattttctcagaaactggcatattgatttccacagtggctgtacaagtttgcactctcacgagcaatggaggagtgttcctcctgctccccatcctctccaacataaactgtcacttgtgtttttgatcttctccaatctgacaatttaagtgataaggaaaaatatcctccactgatgcaataagcctgtcaagcctaattaaagtccaggttttaatctggtctcaggaaaggggaaaccacaaggctgctcccaaggagggaccttaaatacactctggggaaggagcccctgcttggtaggctttctcaggggcaaggtctagagagacaaagagatggggggcaacatggggctttcaccttaacagtaagatggaatctcacagttgttttgttttcctaatggataagtatgttgagcatttcattgtttctcagccatttgagattcttctgttgaggattctctggttagatctatattcataaaaataattccccagtgacaccagcacaggagcaacagacttcccttcagatgcctcagtctgtgagatcttgctcttctcagttccctccatggatccatctgtcttcccctgatatttgttgtatttaggaaatagtttcctgtggaaaaccacaaaggtttgcctcaaggagtttatagtttatcttttacgtgtagatttattgtccactttgtattgacttttgaatgtgacctgggatacaggctaccaactcccctggtgttcttgcacaaaggggtgatgacacgttccctttcccactggctttcctctgagtctttggagcagctggccatgtttgtgtggccccgcatgtgagttctgacttccatccttttcctgatcccattttccctgctagtgagcttctgggtcaaatagtaagtgtcctccgtcattctcattctttctcccagtccttcctgcttaagtagatttggttaggatgctattgaatatagaccactttccgggagattgacatcttaatatcagaacttctgatctgtggacatggttatcttttcatttatttggagatcctctttaatttctcaaatatgcttatctcttgattgatgtttctactgggcacctactccatgccagtaaagttcaaaatgctatgcacttagccccacaatttccctatggacatatcttgttttttccttgcttaaccatggcaactgagagtcacatggctaacacatgttgctgttgtagttccaaagagtctactctttccagaagctgtgctgttagtctgcagcagtttatacatttgggaattctctagttaggtatttgaagaaataattagcagtcattgaatgctcatgtctctcctcccacatccagaattaaatccatgaactatctgacttgctagctgtatccatgggtgaatggactgctctttagttcaccgtctctaactcacagtggacttgcttgttattagcaaatcatgttaggatgatctctgcaatacatgttaattagatgatatttctctctcttggttgtctcatttagataccacgaagcagtaaatgtgtcttatgctctcagcagcatgtaggaaatggctgggcctctgccgagcaggaaaaaaagtgctctccatctcatgtgctgctcatcagccaccgtcaccaccctgccctgcatcttaccattcacgggagccctcagtatggcacacagggatttcacctgataaatgctgtctgggcctttagtttcgtctaatggttctttccttctccttttaagagacaagaaaaaggaatgggctgttttataccctttcaatcctctgatcttcagaaaggaaaatgttaaaagccatggtgcagctgttttatgttgcagtttataatctaattaaatgtattttatccagatcattatggacttcattaaagctggactttttataagaaagatgatcagttagaggatgcagaatcatctgggtctgttaaattttgtgatcatatcagaagagggggggaaaaaaactctcaaatctgcctttgggatttagttggtcatttaattttggaaagttcttgcttcccattttgctctgtaattttttttccctgtgagcagacagagtgattcacggttggatatatagtgtgcctggcggatggcactgttgggaggtgatggaaatatttaagaggtgggcatagctggaggaagcaggcagctggggctgtgcccttgaaggacatgttagatctgggaatcttttgtttccaccggtgtcttcccgttcctcctctttccctcatttctcatacagtgaggtgagcagctttgcaccatcagctctttgcttagcattacagatgcttgtcctgatgatatttggctttgtctttagttgttgccaaagagagatgaaatggcatttcttggctgtgagatttttcttttttccttttgtgctgtggaagaaatcggtttattgccctacgttaaccgctgattgtttctagtgttggggaaaggcatctaaaccagtgtttgaaaaaaaaaagtgactcctgtttgtctctgttcttgttgctgtgttttgagcgttttcgcatggcaacaagaaaagcaatgcatgtatccgcaccaagagtggtccagctggatgctgtggcactccacttttgtttcgtaagcctccatctgactcccatagggatgcagtagtctccatccctgccagcaccggctcctctttccccacactgtcacccgcatttgttcctcattgttttcttagtgggagccattctgattcaggtgagatacactttcaaggtggttttggtttgaatttctccaggagttaaggctgttcatttttccccatgtgtctattggccacttgtatctattgaaaattgcctgttgagctttccattgattagatggttctctcggtgtttagtatgttgagattttgtatattctgggttgtttttttgtttgtttgtttgtttgttttttggctttttttgatctgctatttttattttatttttttcttctatatttttaaatttaaattagaaacaatcttgttttgcatgtcaattccagttccctctctctcccctctccccctgctccccactgacccccatcccatcccctttctgcgccccagggagggtgagggctcaaagtctgtcttcaaagtcttcaaagtctgtcatcatttggagcagggcctagacctcccccgtgtgtctgtgtgtctgggctgagagagtatccctctatcttaccctgttacaggaacatctctcaagcctttcccatcccgatgactctttctgtgctgtgcaggaactttttaatgtcacttgtcagttatgccattattttctgacccgttaggacattattcaggaagttattgctaatacatacctctcaacatgtttttcctgtgtcttctccccccagcagtctctgggtttcatgtatttacattaaatttagtcttggtgcagtttgaattggttccactcatatggctcccagcttttccattgtagttatcggagacaccctctcctcaccaagtggcgctttgcagagaatcggatggctgtggatgcgtggatttagatgagccctcaattcttttcccccatcgtcttcatgaagtgtttatcttcttcctcagtttacctgatggcagtttcttaacaaatatattgtacattgagcctgtgtgaaacattagttagctactctttgaagtgtgtgtgtgtgtgtgtgtgtgtgtgtgtgtgtgtgtgtgatactgcatctacctgactggacagcatggtaagatatcttcagggtttgaagacttttttaaaggcttatccttttaatcagagaaatgcaggaagtctgttgggtctgagaactttggtgaacttctgacctttcatttcaaagcaagatgaatactgctttgttgtttatggccctaattctgcattttgtaaaattctgtgtgttagttgcattaatgtatgcatctctctattattgtttcccttgttgatattattattgctagtaccatcaacttatatttggctttgtctagtacttacttcttttatctgaaagtgtgcatattttatctttatggaggccaatattcactagtgagattaagcggtaattgattactgaaaaatttacatggattatacagtgtctcactcctgccaggattttaagaatcaccgagtgtgtgtgaaagcagtttcatagactccgctcacatattagaaaatgctcgtttaagcagggtgtggtgattcatgtctctaatcctaggatttgggaggctggggcagaaggctgggagcaagttcaaggctagttgggcaacacagtgagtatgaggtcactctgggccacatgagaccttggcttagcatctctccccctcaaaagaagaaaaggggggtgaaggaaaaaaagaaaggaaggcgggaaagtcactgggtgatttttgtgtcctctgcccatttttctttcacaccaatttgcttttcagttaaacttatttaggccagagtcctccccctgttccgctgaattctgttgagtactttgccgtgttttcttggttacttattcggaagaagcattgaagttgcccctatagcccgcacacctgctgtaaaggcctcacagcgctttataatcccagcccagtcagtttgcttaagtcatcaccgtcacctcctattggggcacacaccattaaaagtggacaatactgaggtttgtctaagagtgccctgtcctatcttaaaatcagggttcccctggagacatcctgtcatgatttggttctctggaatttgactcaaaactatatacatttttggttttattcagtacctgactccagcgctgcagcaaccctgtgaagtccatcttgtccctatttcgctggggagaaaatgaaagtgtagagagtttaagcaagtggccggcacaagtaatgctggtatttagaactcactgcctggatcctggacgctagttttacatatactattggaacaaaatactttctagaaaatatgtatttattgtacatacaatcttggtacctagtgtttaagcaatctcgttaataaacattctcaatgtttttgctaaaatattgctggatcagacattctgatgcttgtagttttgctctcccccacctgtgtgtggatggtaaagccctttccgtctagggctttccttagttaaaaggtgatggagatttcactcacttatttacttacttctttttgttttgtctcactttttttttttttcttttgtctctgttttcgaggcagggtcttgctctgtggtccaggctagagtagaacgtgtactattctgactttagcctcctgtgtgctgggattacaggcgtatatcacatagatgtggctttcatattacagaagatgctatagtttgggtatctaatgtgccaaggaagccctgttgccttgctgatggtgctgttgggaggtgatggaaatatttacgaggtgggcaatgctgggggaagcaggcggctggggccgtgcccttgaggggcctgttagggatgggagcctctctctgttttcatctgtcttctctttcctcctcttcccctcattcctcttttccccctcccttcctctcatcatagtggggtgagcagctctgtaccatcactctttgtttattatcacttagtattacagataccttccctgatgatatttgtctttggctttagttgtttagttgttgttaatgtttatttttttcaagacagggtttctctgtgttacagcgttggctgtcatggaactcactttatagaccaggctggcctcaaactcatagagatctgcctgcctcagcctcctgagtgctgggattaaagcttgcaccaccatcacccagtttatatagttttttctttaattaacatatgaattttctgtcttgggaatacttggctgtatcaagattttagaaatattttcagattttccaatacatttattaattttaaaaattgaaatcttagggttactgttcttgcaaaggacaagtgttcagttctcagcacccacactgggaagatcacaaccaccttcaattctcagtccagaggattatgccctctttttactccctgggcatcccatatctatcacacacacacacacacacacacacacacacacacacacacacacagagagagagagagggggggaggggcagggtgttatcatgctttctttttttcccaagtagaaatgcccttatgccattagcttttcataggtaacacgtagactataattttcctaatcagttgaaagagaatgatgctcttcataaaatcagttgacggaaatagttgttttttaatctgagtgagttaattgttctcattatctgctctttcctgtgtcattctcttcctccccccctcccctctgtcttattcctcttaactgaagggtctcctccatgcttaacattgcattagcagccaagatttaccaaatttatttcatcacattttattacttaaaacagtattactacaacatcttttttgttttgagacaaggtttctctgtatagccctggctgtccctttgtagactaggctggccttgaacttagagatcaacttgcctgtactttctgagtactgggactaactaatttatgatagttttcataaatgtatgtgtgtacaccacatgtatgcagtgccagcagaggtcagaagagggtatatgatcccctgagactagagttacagatggctgtgtacaactatgagggtgatgaaaattgaacccaggtcctttggtagaacagccagtgctcccaaccactaagccatctctccaacctgacagtgttatctttcctatctaaaaatttttgcatgacctctttatttacctaatttgtttgagtgtgtgtgtgtgtgtgtgtgtgtgtgtgtgtgtgtgtgtgtgtgttgtatgtatatatgtatgggtgtatattatgggtgtatatgtgtgagtgtgtatgtgtgggtatgtatgtatgggtgtgtatgtttgtgtgtgggtgtgtatgtgtgggtgtgtatgtatgtatgtttgtgtgtgggtgtgtatgtgtgagtgtgtaagtgtgggtgtggatatgtgtatgtgtatgtgtgagtgtgtatgtatagtaagcactataccattgatcttaaatcccagtcctagtcatttcttttttttttttattatttttgtacatggctgacaggaagtttagtatctagtaaaatactcctgcttgactcaatggatgttgatacaaataaacattaaaattacttcaacaaattatacaagattcttaataagtggtgtggaatcataatatctattacctttaaggtggttgatagttttaaggattacttctttgagagcatctttgtttatttgttcatataatttttataattttcaatggtattttttagtttttaatttcattggtatatagtttctgttaaatctatcctacatatcttattatttatgttagttttttttaaaggtattgttttcatttgagcctttagctatttctagtattcaaaaaagtgaatttttgtgtaattatcttaaacctatatactgagtaaatattagaattgcattttcaaagtgtataatcttatctgtaaagatgctgcccgaatatttatatttatcttaaataatttcttacatcagagggacccttcagaacactattttggtagtcatctgtcaaatttcttactttaataaaattggctgtaacatttcacccttactgtgatgtttgctgttgaatcttattacattgtcttcattatacttagttattctcatcttccctgttgaaatgtttttaccagactgatttattgacctaatttgttgtgtatgtgtgtacatatgggacctcattagctttcttttgtagctttggccagaacatcgagctcttcatcaaactggtactggtgaaagggggctagaaattggtttgcatgtgttttgtttcttcagtgacccatgacctctagcgtctccactgagcaggaggcagagacttactcctccctaaactcttaatttgtaagatgtcaggttggtgcatattgctaggggcgtaagttatttcctgttaattagcctataagccattgcaacttgctttaagaagtaaatccaaggaacaacttttcgtgtgtgtgtgtgtgtgtgtgtgtgtgtgtgtgtgtgtgtgtgtgtgtgtgtgtgtaagggacttcctttgatttagaacaataaatagtgaatcaattcaattcaagtctgtgtctaattatgtatgcaagtttcaaattagaaaaaaaaggatattattttagggaatggtttcctgtctttaaaatagaaactttggactaaaggttccggagagcctttctgagcagagcccaaagcactatgggtaatcctgatggagggtggggtcaggtttgctttcacctggaggtgctggaaattctttgagggaatcattccactctccaccctctgcactcaggattttgcctgtggcagagttttaacttcagcctgcatgagaaaggaaaatacatacagtaatggctttgggcagctgccagggaaaaactagcccctccaacaatcactttctattatcctttactgctcatatgatacattattcatcattcccaagtatgctcattataaatgctgcttaatcacattttaaaggtaaacagcatttatcaaattatcatccagcgtctagctcggagtcagccccgttcattcttcaccacaagcctgtgtcctgagggagaacatgtgtgtttattttctgtcccatcgttctgtccaagggttgagaactgcacacgtgtcctcttgagttatttcccatgtttcaccccatccccccatattaaaataatcatcttggtttgcttgtgttgatcctacctcaagacatggtttaaatatgtgtactactttagttttctttcctggactacccccagtatctattgtggtatccaaacatttttgttattgttgtttcaagtgtttaagtatctctattcatcattttgtgtagtatatgctggcaatatttatttaactgaatgataacaccagtgtttagttggaccttgataaattatggaattttgtgaggaatataaaaaaattgttaaatgtttttattcccataatccatttttaatattgaacatagtggatagagcaaagctaattcatggactcaatatttaaatgtgcaacttcatgtatatgttggcatacatttatttgtatgtattaagggtgtgaaaaatcaagcatgtctttaatcccagtgctcctgaggcagaggtgagcagatccccatgagttccaggccagccagggctatacagtgagaccttgtctcaaaaacaatacaaaaacatggagttgtgaaaaagagaaaaagttcccagcatgctttgcaaatcatgataggacacttgggctcttagcattttactttattccataaaaacacatttctgcagccacactgggtgcatcagcacctcagggcttctgtcttcctcttttctaactgtagcaaacacatggaaagctcatgattctcacgtcattcttggacatggggccacactaatctgcttgtctctagctttagtgtttgtattgctggcgtgagcagtgtatggttcctcaagtgtggattcatttggaaacctacgggttttccccacctttgctttattctgagcatattatttgtttccaatcattattttcccccattcagagccatatttgccaggaggagcctgttacagcgggcgacaagtgccaaggctgatttacacaaggactaagtatagagaaatggtggctgcccatcttctctcttcctgagcactctacaccacacaggcacttggcttgtcactttctgtagttagagtgtgccaccagatgtacatggagctgcatctttaactttaggctatcagtcatagacctacaatagactctttaaacttttggatcctcctttttctccactgtgaaacaaaagaaaccaagcttattatggagaatgttagagaagtgtgaccctgaagtgccacttgaggctttagccgctcaccttactcgttttggccaggcacgtacatggtgatgaaagtctctccaattgctcagacctttttgcttctgatagaacataatccttggtaactgtctggagtgagccccaactccatctgagtccactctacagaggctgtgacttctccggttctcttccagagtcaggaatggtgactttggtgacatgctcactcactctgaccatgaacggctcatgtgctctccctttaggactccttgtccagagtataatcattgctggcttattttatggatgcttaagctcctccaaggcagggtgtgtttgcctgagaacacacacccgcccacacccatgtgtactctttttcacagaaaaattcaactctgaacaaacaagataaccagaattttgccatgtgagactagaaaacggttatatgtgtttcagcatccgtgaaactttgtcttctgatctttccattattattttttttttcaaaaccacactgggggaagagagaggggaaaatctgagttttttcactttgtggggattgggagttgtttgttcccacctagtcctctatgtttgtctaccgctagttcttcaacacctggatgccaacggtagaaagagtgcagccatctgccttgcacttatttgccatttatgcaatgttttatgtgattttttcaaacaaaattctaagcagcaaatattaagatataatagaatcaatggcatgtagaccacaaaactttagagatctataaaaacttagaaacccaaaagtgggtgtgttttcaaaatattttaatgagctaccctcaccacctttgaagtattctttttataatgaaagcagattatagggctccattctgtcattttggaaaaaatgtatagattcttttgggatattttaaaaggagaggggtccccaggagccttgctgcacttactctgcaatccccgccccccccccaaacctattgagcctgggagtttctgagtaactcagtttgaaactactgctgtaatctagtcaggctgctgctacagtatgggtaaacacagattattgttctctttgggttctagagttttgaattaaccttgtaaattactgccagaaaaaaaacagtattggaaggcaacactgggatgttttacctaagagaagtgaatcaacaggtcagcccccattgcaatcgcaagtgtgtgtgtcaaaaagaaacaagcagcgtgtgtcccactaagacagctcagaagactgactagtgatctcactgagaatcttgggctagtggattcagttccaggtatattttcctcccttgagtttcttgtactttttaaaaactctttgctctcatgctaaatgtgaaataaaacaaaaagccataaatagcagataaattctaccatattaaaaataataattctaaaaaaacattgaatgacaagctgtgatctcagagccatgcagccaagtgatagaaattaaaacaagctgagttcgcaagaattacctggggctattccctccccccacgcaccagtctcttgccagtgtctcccaggagctccgggacgttctccaaatgcagacataaatgctctttgactcagtagatacaatgtagagagatttgtcctacagttatttatcaaatacaggaagtgacagatgtagaagacgttagccacactttaatttacaataggaaaagaattgagagtctgtacttacgctgtggtaaccatgtcctgggacagcgtgaagtcatggaaaacaacagagaagctctgtgtcttcatgtgaatttgacactaagctgctttgttaagagcgcagagataacttccatgtgccacatggtacgtggttagttgtgtaaaaaggaaagggagaagagcacctacatgcgtttttttgtagatgcagaaagtaaaaggcaaagttgatgtctctggacatagaaaccactaagggagagagatggtccctttcattcttaaatgaaaagtaaaggaaatcttacagcccatttggttacagtctcacttagcttttcatcaaaacctctaattgagatgtttttaggataatgttttctcagatgagagctgcaaggctgttggcagagccactatggtgtgatggctctggtggcttcagtgcacaagctgtgacccatctgcccatgcaccagccttgtcatatcatgcttgtttcagaatctctgtgttcctcaactttctggaaatcagtaacgctgggtatttttagactctgttccattgcaggcccagctagataatccagttctttctacctatggggcctgatgtcttggaatgtttgtcttgctaacaataaatacccactttagttgttcacactgtcttttgaatatttatttctatatagatcaagttgtatatcatcaacaagccaacatttagacagaggaccaaaatactgagacaagtgtgcatttctcaaatcttctcaaatctttctctttctttctttctttctttctttctttctttctttctttctttctttctttctttctttcttcctcctccctccctccctccctccctccctcccttccttctctcctttccctccctctccctctctcctctttctcctactctccctccctgcctccctcttttctttcttccttctttccctgagcagtatttgcccgaagtggtaggaactgaatatgtatgagcacatgttgcacgccaatcttcagttataattgcttgcagtagggaaacaggcaaagaaagtagatggcgggatataggcaatcagagatgaggtccccacacctgccaggtcccatgagctgcacatagtcttctgcagagaaactgagatgctgctgtcctgtgacaagaagttccaattaatgtgactcagatgcatctgtctgtcagtagctcacctcaagaagcgacagcctatcctgccgcaggagtcggtcaaagggcttatttggtaagtgcaccgagaggcaacctgggacctgtgctgagtagccaggatcttgtttctcttttccatttacctcaagtcaggagtaggagatagctgacagggaaatgtggctgccagtagcctaaggaggaggcctttgtatagtaaatgccatttctgaaagcatatgcgcctcagacgcaaggttagagaagagataagcatgacagattgctagatttgggtcactgaaataaaaatttgtttaccctgttaattttgggatgaagacatttgtgtcctaatttagaattgatgagtttaaacaggaccatctgattataatatatactgggtggtgacctggtagtcagagtggctgatttaattttgaagctatccattatatggtccattttgtatatgtgtgtgtttctttgtctgtgttttctcttcccatatttgtagagtaaccaggaacttcccacagactcactggagcttcataggtctctgggaagggtggagcactagggattgccacagcccccgaaaggccatggctgtgcaccatccagagttgtccacatgtcatttaaaactactgggctcctccttcactctgccacacctcccaccctgttcccaggacagataccacttagccctctgcaggtttgctctgtagacctgttttcccctctgctctccttcctcagctgggtgtgagtgcttgagcacagaaaaccctgcttggtacattccatgtttcactgactgcaaaaagagcataccagttaagttttggcttcgattcttctcttgtgactgcagtttttggcaaactgaattactatccctgcagccagttctattcgcactgtgtgtgtgtgtgtgtgtgtgtgtgtgtgtgtgtgtgtgtgtgtgtgttgcatgcatgcaaacagacatgcatgtgtgtgtgttggattcttgtgtaggttgatatgcatgtctatatgtgtgcagagaccagagggggatgtcatgtcctgttcttatcctttgagatggtctttctcactgaacgtgaagctaggttggcagccagcaagctctagaaacccccccagtctctgctcccgacaatactagggttgaacatatgcccatggtcacacccgtggtgccagggacccaaactcagatcctcatgcttgtgccctagtgctcttacctgctgggccatctcctcaaccacatgcacgtattcaatgaggaaaattggtggaatccaaatcactcagctttgtcatgggagtgtggtttgattctcatccagtccggatttccaaaaaagcccatgctttaaggagtgtttgcattaggatcagaccattttatgaagttagtttcatttgatgcaggagtaaagctcttgagaacacatgcattctgtttacaacttctggaagaaggtgccctgaagagcacttatgaatctgttactgctttgagctttctgtgctaggcaatttaatacgtttaatagctgcttaaatatcattcaattccatgtatcatttaatcactgcagtgatcttctgaaatatatatatacattatacatatacatatatgtgcatatatatacatacaacacacatatataatttctgtgaccagcatatggtatcacaatcaggaccttggcattgatggaacatgtccatcgccaggaaagcccctcatgcggccggaactcttaaaactgtgcccagtgtgcccacattactccagctttaaaaagtattatcttccattttccacttttcaagaatgttatagagcatgtaataaatagtttaacgtgaacttttcctttagcgaagttctgtggaggtccactccagctcttgtatgtatcctgtctgtcatttttgttgttaaggagtagtccatggttaggatggaccaatttcctcctgggttccttctgtcaagtcccaaaaaaaccccaggacaagtctcactcagtagctgtggctcttcccagcacttctcaccctgccccctaccctactctccagcccaggggctgggcttcgcttcccttcccccagctttggagtcctatataaaccagctgttttggccatatgctctctcccttagatctacaataaaacccttctcctcaaacaaagtttggatcagtcatttcctcattttcatttcggcttccagttttttcctattgaaaatggtgtttctaaatattcttgggcaggttttgtgggaatataagtcttcattttctggggtacttgctcaagacttgggggttgttgcacatttattgtgttctgtggtttgtcctttgttcctgtgttgggagctttgtccccagtataacagttgatgcaacatttaagaaatgtgtcctagcaggagaccttgggccactagagtaagttatcagaaaggatggcacaatcccagcctctgtggctttttgtgattccttccttcctacaccattgtagacattgatatcgccatgagatgatacagccaaagcatccctcaccacaatctgtgccttgctgtgagctaaataatgctcttttcttgtggttgtaataacacaaaacaaacggatggtatgcaacttgcattgaccccaagaagtatgttattgtcttttaaaatctgaattataagcgagaaaacaaaagcccacagtagtcaccttgttcaaagtgagctagccagtcaattgtagaacttcaaacttgacctgagacctgtctgaccctctcactctgtgccttttccagtagaggactgtgctatataatatgtgacttttcgtacatagtggtgttttttacctgtccttaaatcactagacacaaggaggtgaatttgtggacgtatgctttgtgttgaagttttactcaagagttggaggccactgaagagatccagactccatggtcatgtgcctcttaaacattttcatgataggcaaggcaaggagcctcagatcttgtctttgtgagaagttgagtcgtgggaggtgtttgctcaaggaatcaaggatctaaatctgagctctctgggttttgttgttgttgttgtttgttttgtgttttttgtttgtttgtttactagctgtgcttctttctgcatggacagctgtcagggctggtgcaggcagcctagtgactggcagctctcaggaaggcggatgctggggagggaagggggaactggttgagccgggagagcagggccttcctgggtgatctgatctgcagtgttgcggtgctggtgtttgggggatgcatatgttgtagcctctacctgaaatctaaggaacacttctaggtgacatttgacaggaaggtaccctgtgggagaagagggctcactctctgtctgaccaacatttaatcattaatgcgtcatgtctgatcagtaggatctgcctggacatttatatggaaccactagctttgtatttacttctccccccactcccaataaaaggaaaagattcttatttagcaattttggaaaatgacaaccaattcacatgatagtggcaagattcaacgtagctttagaggctatgtaatttatgctatgcaagaaatgtcccccccccccattccaggagatttaacataaggcaggggttgccactctgctttcggtttagtctctacagactgaaatgaagctagaatgaaaaaaaaaacaaaaaaaaaacccgattctttgtttacagctgccaagacctgaagtcagcctcatctgcaatgtaactaacctgaagtaatgttcctttccaaaggtcagtgttgtttgtgttgtagtaatggattttttccattaacatttaatttcatttctgatctcaatatttaataaacctgtacagaagattccggaagttgctctgtctaagcctgtgcttttctttttggctgatagatagcaattaggtgctgaggttgtttagtctgttctgcgacaaggatgatcatgccggtgatgtctgtttatgtgatttcctgtggggactccatattatagagccaccggacatccctaggagcacagagaaatcctagtctcagttcctcgttatgtaacattaagttccttgtacagtaggcaatctcacatgtagtcttgtctgagaggaagaaactttgaaggtatcagtgattttcagataatattctgaggatgcagcccagtgctccttccagcactggatggcttagggatgcacaagccatcatgtttcttttacagcctgtcacttctgactggggagggcacgttgtcaggttcatgtaacattatttgatggaacctttccacgcttgaaatgtgtagtcagggtgcttgataaggatttttaagaccacgtcattaatgatacatagcacataaatggtaatttgtgtgctcatatgaatttgtagcctgtacaacagggtcaatggcagtggggttttgtaaaagcatcactatgggactctttccagatttcagaggtgaattggccatcaagagtattaaggtagagtaaaataaaataaaacctagcctgtcatctcccaagaaaagaagaaaaactataattttgtttgattgtatgtttcagggttctcttgccaaagtgcgtctcatataggtagaacttgtacagttaggagacatgatttaagtcacagtctaggagttctttatgcctcttctgtggagactctggcttggcagggggccagggggcagagcggggagaagagaaaggactatgctttttgttttattttattttttgacaaaacaaataatctcctttaagggatggctccctgtagagcccctgagacatttgcagacagttcctgaagttattacaaatccacggctttctgtcagcaacatcactatgtctctatccagtttaatcataagtccactcagatcacaagggagagactctgctcgcctccattgttaagatggtgtgttgctgagtttgaggccagtgccccatctcacgatgcattgggtccttgagagtgacttctgtagtagcattgatattcaagaagtgcagctagtatttcccaagctgcgggctctttgacctcattctctctgtaattcattcagttcattttgggagaccaggtcccttgccatccctggtcctttccatttgcagagagacattatgcatctctatatttaacacatgcatgttctcattcaggctgatctgtttcttttgtttcagtccccctggctcagacctatcagcatttccttcccagatgttacctgcaaaggtcttcccacctttccattgagattatactgagctttctctttttctggaaaacgttgaagtttatgttatgttgcatttccccaacagctctctagaatcatccctctactcctgtggcggagagcaagatcttgggtaatacagctgaagaatactggccaatggttagtgaaaccttgagttaatcccaagatcagctggctaagacagttggtgtaagtgtgtggaaatctggctttccttgttttctcccctcccacctgatagtaatagtgttttcaaagtagcaatgcatcattattagtccctttatttttgctgactggccaatgtctgccatatgcaggtgtctctgaaacaatagctagcaggtaccagatacatttcctctgtagtgtgccttcctccctccacccccactatctggatttttctttgtatcagagttaaaaggcatgccttcgttctctaaagggatccagcccctgaagtcgagcaattcattcttagcatcatctttaagaaagatgcccagaaaagaacaaaatgtacagttttgttcgttggcagtcctaaagtagtaacgactttgggaaatgacaaagagtgacatgtttctggtgaaactgtggagggaagtgtggaggatccaggtagttccactggtcattcatttccagacattcagtgttctctctcagagctgagttttttaactggtgacaagacactgaatctgtggctagggcttgctgtgctaatgatctgttgtccggttgctaattttaaatggcttgtcgtcatgcacagacacacaaagctctccaccagggccctcgctcagctcacgcttcttctatttccagcactagatactctcagctgtttgttctccttctccatagagcctgaagccagccaggaacaaggccttcctgtgtcccaacagagagggacctgattgaggacctgagggaatgtgtggggaaatagggtggtatgcttcagagctgcctcgttcttcctagattccatcctactgtccttaggagaaagggcagtagacttttttttctctcagaattaacatttaggtgagagaattcagagttcggattgctagtgtggctgttttcctattgtgagggcatcatggcagggttaaatgtgacagccttctgcttccccactgttttttttctaggggtctcctgtagtaatttaagacatgtccctgtccaccttccactcacacatggaaagtttttatactcatttatgattgacaacttaaatttttgattccaaagtgatttgagactcagttgtttaaatgcatgcctagcatagtcctggctttgatacccagtgccgtgaaaactgggaatggcggtacatgcctgtagtcacagcattcagaaagtggaggccaaaggatcagaagttcatggacgtgttctgctatatcaatccagtttcacctcaggctaaaggagaatctgtctttaaaaaataaagagattcaaggtcatgtttgcatactaatggatacatatctctgtttttgagaatgttcctatagctgaggtgttatgtggttcaacggtaattgctaatttactaaactgtatttgtcaggtagcaaaactaaggatcaaggacatgtcacggctcaaggtggcaccattggtacgtggcacaatgggcaatgtaaaccccaagatgaaggcctcctggatctacattctgaccctttcaccacgcgctgattcatgtaactagttccccacagagaggcatagtcctctcacttatcacagtaacaaatattcatagagcgaacccctttgtacacagatacttattaaaaatatgcctgtgatacatgcgttttaatgtgcaagaaccaacctgattttacaatgattttagctcgtagtgacctgtgcaaagaggttgaggtctgtctgtgtaggagctggtgctgtgtcttgaaagtggcattggatctcagttctcctgtagtgtcattaggcttgtgcttgcttttaaaagacccagaatctgtgttctcagttattcttgctgctggaacccatgttttaactcccagtggccttcaacaccaagaagaagaaactctgattgcttattaatttggggtgcctctcaggagtcgagtctgcagagaggtcacagaagatacagtccttaaagggaggtgtccatacccccatttgcagtatcacagtgaaacgacaattgcgtttttccattttccattccaatgggttttggtgtgttgaaaaacaaatagaaatacacacacacacacacacacacacacacacaaaaaaaaaaaaaaaaaaaaaaaaaaaaacttgatcagaggaatattttcctatattgctgagaaagcaatagcattgtaagagcagggtggcttttcatcaatggagtgattaattactatatcagaatgtgtagatggagatcaataaaacaatgacaggtaaatgagtttccggcctcctcagagcatctcccagcaggccccacatcagctcccctccaagctgcacgacaggcctctgtactagatcgaaggctttgttggcctgacagctctttttctggatgtaggatgtggagcccaccaactgaagtcctcttctgagtagagttcagtcttccgttgcttacccagagcctgccttgagatggtctctgtgggacagtaggggaccaggattcagactgtgccatctgcgcaggaagtctgactggatgcttggtttgtgactgcgcttgctcacatatgcgaagctgctgcgctaactgctaacccacactcccaagcctaaggatttctaaattggcagttctgttttgcgcccaaaaactgtattgtaattctgtacccatgcacaggttgcaacgttcctctctgtttcctgaatctgaaggtggcaacaagggttaaagaagtgacctcttgacctcggcttgagttggatggaggtgctgtggcagtgggagcttccgcctgttgctggcacgctctgtgtagtttcctcaggttaacgggttactgcctttcgatagtcatgggcttctgctattggcatccggagttgctacatggtgtgttcacaattaaatggcactctctttagcttttgtttttgccattaaattggcattaactttcataaccctgaaaagctctgtgctgggatgctctgtaaatgctgctgagggcatgcagacatgcttagcctgcacggaaaggggctgtgggggtctgaggttctatcaagcctggcagtggttgacagaagctttgtttcctccctcatcaaagacaacagctcttaagtggtgaggatacagctggcaaaaaactctcctgtgaggcaaggtcccgggttcaattcctggtaaaacaaccaaataagcaaacaaaaatacaaattaaaaaaaaaaaaggaaaagttccaaaagcaaaaacaaagcccaaagcagcatttgggcatggtagtccatgttcagaatcccacatttgggaattctgacatttgggaagcagaggccaggaagccgggagttcaaggccatccttggctatatagcaagtttaaagctaatccaggctacatgaaaccctgtctttaaacatacacacacacacatgcacgcacgcacgcacgcacgcacgcacgcacgcgcgcgcgcgcgcgcacacacacacacacacacacacacacacacacacacacacaccagaaacacaaaaagtaacaatcttttaagcacgaagtataacccacagcataatgtctgatttgttcccttgtctataaagtggggccaatcagaagatcctctgcattgctggttgccattggatcacatgagttagcatgtaaagtagtgagaatgccatctggtacatgcttaatacattattagcagctgctgtgattaaagctgttattcatcattaacattttatctttccaacagactcctttcttacagggagtagggtgggagactaaagcctttgaaatggttggtttaacatcatgaacacaaaaccaggttgagtgcttgcagaaaaggaaatgtaattcgcagaacacgttgttggttgaaacttagctaaggatgggaggattgcagttcctcatggaagtctctgttgctcattaggagacagagaccagctgagatctcccaagtgggcttcccagtttctcactgaaaaaccacaggtagtaagaacgtttattttgcccctggttattttttaaaggtattgtgcggaaggggaagctggttcctcctactggatggattctgcactgggctgcagacctgtgcagagtggtcaaagtagatgtcagagatgtcagagggctggattatgtttagatggagcttggacaaagatgtcatgagatactgctctgattgggtagatgggatccgaaaaatcccttggtttgaagactggagtatttgtgaaaatgatagtaaactattctggcaggccaataacaatcctataagcaccaagatacatgctgtgtgccagggaggaaatgttttgcaatcccctttctttcaatatacctggtgcagcttgttaaattgcttcacgttacttcaccgtatttctgagatctcagaaagaaagcgagctcttattttcaacactgccttttattatcttaaaatatttatcttatttctgtatacttctgtgtattttaataatttatttaacctggtatggtcctgaaaagaattggacagaattcttcattgacttcctttgtcaccgacatttaactgtacacctagatcaactggctctgagttcttgtcagcatgacagacacaggtagatcagagaacacgcttgattgagaactcagccaagagagttcattatggaaatgatggtggcagcatttttcatttatctttttgactgtgcatttgtcctagaaggctttgttgccgatcttcacaaatcaaacctcagatttaaaagagaaaatggcagttcccccaaagacatttctctttctagcctgtttttctccagtgtcttgttttggaagaagtcaaaggaataagtgatgccgggcattggtggtgcacacatgaggcagaggcaggtggatctctgtgagtttgaagccagcctggtctacagagcgagttccaggataggctccaaagcaatgcagagaaaccctgtctcaaaaaacaaaaacaaaaacaaacaaacaaccaagcaaacaaaaagaatagctgacaagagtgtagagcagtcctgccaccattatcattgtggactggactgtgctgtggtgcaggcatccagtggaatccctggtttctggaaggaggaatcaatacccacaagttgtcatctgacctctacacatatgctatcagtatagcacacacacatgcatgaatgcacatggctaaataataaatatcaaaaccaatcatcctaaatggagaggtaccatagagggtaatagagaaatgcagaaagctcagggaaggacactgggccttgcaggcagtggaagagttctctatataaaataaaaattttatataaaaaataaaaaccaaaggtgtcagggaattatttgcaacacttaagacaaagaattagtgctttcaccacatagagagtgcaagctagtcaggaagaaatgggtgttagtgggggaaagcacatagtgaaaaacagacagtattcaaattcatgcatagcacccataatgcctctttgctttctgttgttgttgggttttttgttgtttatttgggggtatctgatatttatttgtttgtttggctctgtgttttggggacagggtctatactttgtgcagcccaggctggtctggaagttgcaatcttcctgcctcaacttcccaagtgcttggatggcaggcgccaccaccaccctgggctgttcttgatatctctgtaatctatgcatctacagtctacaaatcactgcatgaggcagagcaaaccttgggggtttgcactgggagtctgggggaatctgcaggaaagctcttgggggagaggggcaccatggtgagaacactcctgtgttcactctggagcttgacagaacatggccatagctgtggattgctgttttgctttgaaagagacaatggaatgaaccctgcttattggagatgtttctgtggacttagggtgagtaggaaaggacctggctgtgctcttcatgtgggcatgtgtgtttcctttctctgtctcttaaagacttggatcactgaagacctagtatgcacctagtctggttcttggcatctaagtaccattctccacaggatgcttcttgtggaatctgattcttggttgaaaccgtgaacagtgaatgttgagcttggggcacattgtaaggcaatatgttaagaaagagaaagcctggtccagaggacaaaggagccagcttaaagggattcctgctctccacatctggggtgatttgagtatcaaaaacaatgagagcactgagtgaaccaggaacttgtgaatccatgctggcctgaataaatgagttctccaagtctgtttgatgagaaatgagatgtttgtatcatctcagggtgatttctagactaccaaatgtgcattactttacaaagggaaaatggcagcgtcacagttctgaagtcatgtgtgatgttcaaaccaagaggtcaaagcatcagtgacaagcatgttagtatcttgtgctgcctgagagggtagcaggagcatgactctctaaggtggacctatcatcggaaagcaagcacgagcaaacagcaggcaaaacccaggaggagaagcaggctgacgacttccccctactttaccagcgcttcattcctgcaagccagagaaacataagctttgattctgatctagaacctttggctctggacaagagtcatcagggaatggtcagtaagacttaaacggtgtttaaacattaggttgtggcaatacatagttgttaactcctcttttatggttgtactgcaggaatttgctattgtgtagagaaatgctgtttagaggaccagagtgtaggccagtggtatagcacctgtctatcatgacgaggccctgggtgcaatcccaagcaaatacacacacacacacacacacacacacacacacacacacacacacacacacgggggggagagagagagagagagagagagagagagagagagagagcttataggctatgctactcataactaattttcaagtggttcagaaaaataagctacaacttttctttaagtttgagattctttcaaaattacaaaacaatcctgggtagtggcatcactgctaatcatgttgtactttgctggtatcctgtgagtaacatgttaacatgtgccaacagccttggacgtgaataagatggcatctgttattccaatctaattgagcagaaacactcttatgtgaaagtcacattattaactatacatgccttgggttcttagctgtgtacagagactcatatacaaagactagacaccctacccactgctcttagtgtgagacagttgagactaggggactctgactacccatacagtccctaaattatttcccattgtttctcttagtatctccctctattgatgtgattctgctttccttccctttgctcatgcttccttgcttccccttacacactgtattgttctcctcagtctgccttcatgtctgacccatttctatagacgctctggcttcttttgtcttacagttgcttctagttcctgtgctaaaacattttcagatatgtgtgttgcaatttgtttttctgtgactgtagcacagtgttttcttcctcggaaccacgctgattgtgtataggcagcacgttaatgtctttctgtttctgcaacagataggatctgcctggcatggccagctcatggcttcagctgtcatgtcaacagaaatggttcctcggggctccagatcttaacttcaaagtgcaatccagttcctgaaaatttaaaaataagtctgtacgatccagaaattctatatctggggagatgtccaaaaggcttgaaagtggggtcaaacatatttattcacctatgtccatagcggaattagtcacaaactagccaaatagtggaagcagcctatacatctatcaacaggtaatacaatgtatacataaaatggaattcagttttcatcagggaaattcagatgcatacacgagcatgggtgaaccggaagacattacaccaaatgaaataagccagccatcaagggcaggtaaatgagagatgcttagaatcatcaagcttgtgaatacagaaaggctgagtgctgcatttcacttttgcaagatgagatgtttttagagctggatgggcggtggtggagtggcactgtgaatatacttgttgtcctctttaatggttagaatggtcatttttatggtatgaatttaactgtggttaaatttgagaataaggactgtcagttgttctgtggagggggacacactctcatcagttctggacgtaaagggctttccctcaagttgctagaactgagtattctcttgagctggcatcactgtggccagattctatgtcttcatgattactttggtgggacatgaaaagaagtccatgcaactggcaacacttgttacatctactatggacacactccttttccacgtgtgcatgacaactacagatggcctccgttatcttccatttctttgggaaactagggtttaagaagttaatatggtgagtggggcaaaaatgttagggtgtggtggggtcagagttcatactctgccactcagtaccatttccttcagaaagcacaagggcgaactaccagctcaccaggatgtgcctggttcacattctgctcttctttgctgagactagattaaattccttctcatggcacaaacctgctaaccaaacagttcctcccctgctttggaatgctcggcaacaattttgattttcctctcgctgtattttctctttatcttctgtttatttaaaaaatgggttaataagggtctttagtgatctgtataccaaggaaggcctctcgggtaaaactgtccatcctttagtcttctttctcagaaagcaggaaaatgagcatttgctgttataatggggacacaggccatgctggaaaagcgtgcggtccctctgtggtgtggcctgggacttacagtgtattttcctcctcctcctcagctgctattatacgagcgcagtttagagtacctctccagatgcgtgtgccaggcggcctcatacctggctcatccctttaggcttctgattggcccatcagccagtttgatttcatccctgctgtgttggccaggcttgtattgttaaattgccctaattttttttctaaaaggcccacaaattcaaaattaaataaatgtggtctatcaaaccaataactgttacattacagcccagaaatcatacagtacctgctgctacataatgcaattatgcgtgtgaattaaaaaaatgagctgtaagtcttgaatgagagatacttaacacggcaggtctgtggaatttaaagcacacacaaaaagcccgtgaaatgtaatctgtcttcttggcacatttgaaaaacggtcttggattctgtgttttccttgtggaaatgtaactcctgtacctattcattcctttcagatattaagcatgctgttttggtatagaagagtgaaaatagtatgtaccgaaaaaacagacagttgaatttttttttttttacttttattttatgttcatggattgtttgcctacaggaatgcacgcgtacctcatgcatgcctggtgcctgtgggggcagaagagggcatcagattccctggaactgtgggcccctgtgtgagtgttgtgaatcaggatcagtcctctggaagagcagccggtgctcttaaccactgaaccatctctccagcgccacctttccagatctttgtgaagcattcacctaaaatgtgctccagggtcctgtgctgtccatctgcttcctctttgtgaacattaggggcgggcgggccggtgacagacataaatgtgattgttgaagagaagaaatgtgtgtttttcctttatccattttccttctgtgttttgcctgctgtggtagttccttaggggaagcagctcttgcctgggtgtagatgattgtgtgaggagggctgcagagaccaagaggtggccactggcaaaactgcagtgacacacacacacactgaacatttttctgcttgcttttatctcacagggacacatgcatgcacatgctgttgacagaggtgattacatgaactcttaatgtccccaggaggtgaaatcacaaaagtcagaggtttcttgtgagggtagggagtgagggagggaggtggtgtggctggacagatgtagaatttacagttgtttaaatcagataattgcttcaagttctattatgtaaacacggggacaaacactgggagtcaacgtctctgctaagaaatcttagctctctgtttatcattttgtaaagttagcgtaaatggactaccaagtgtgggtcttcacagtgtccaggaaaaaaaagatctgctgaagacaggcactgggtccctgtcagcattgtgtggtgctcatgactctccatattgtttgcctcttctcctcagaaacaaaatagaaatgtcttttagttaataattacagatggaaactccgggaagtgttcaggactggcatcaatggcttagctctgtcattcagcaagcaactgatagccagtattagtcatttcaattgctgcttgtggttggaatctgtgcagccgcaggaggtactgggttactgggtgcacggtacttctaaaaggagacggatgaaggcagctcttgggtttggtgttgagtttgtagagggagatggaggttaactagcagctggaagaaacgctaacagataacaagggagtgcacaggttttcgtgactcttctgaggcatcaaacccgtttaatcgctgtgccccatgctagctgtgtaagctcactgcagataaccatggtataataattccattgaaaaccacatagctgggtgggagacaacacagggccaaggaaagcaccgagtgtggctggagttcaagccctgaccctgaggctgttctagagcataccccagcatcctgatgcttagaagctgtgctaggccttggtgagtaaagcttcccactccacatggacagtggtctgcctggtccttggaattcttccccttcctcacattgctttctaagcacacatgcgggctggttcggcaattcattttctttctctgtatctgtccactggattgtcatgtgtgcacacatgtgtttaaacatgctcatagaaatcagaaggccatgcctggtggcttcttcagttactctccactgtcatttctaggatgtggtctctcactggacctggtgctcattaattcaattagactggctagtcagggagtcccagggaccctatctctgctgccacagtgctggcattaaagatgcttaccatcacacccggcttttcatctcaacagtggagatctgaacccaggttcaagtccttgcattgcaagcattcgagtctccccagcctttaaagttcacaatcagaccctgctaacccactgtcggatttcaagcctttgcactgattgacaccatctacagatttccacggtggcccttttaatctccaagaggctcaggctctggcagaatagtgaaggaaaattcggaattagtgtgaagttatatctggaagggagaagatgcttgcacctgatccctagcctctggcaggttcctaagcttcatctccacatcagaaaggaagagggtggggggcagggcaagtcagctcagaaatgtggcctcaccttctgcagtactgtgtgattctatgtgagtctgtcgaggtataacagtgcagactgctatcccagatgaggagttaactttgctgtccctggataacaaacatgtggcttgccggtgataatgaaggtggcttccttagtcctcttcaggcctgtgatcctagaagcacgtgctttagtctgtttaatttctgttacagccaagaacttgaggctggatacgtactctaatttttggaggctgaaagtctaagttagcatagtctcctttgtctggcttctagtgtggcccttgacaggagtgctcacctggtgtagatgagtgaaaaggaggaagcaagaaaggacaggcaagggccaggctcactcatccagcaaagatctgatccttgcctgccagacttaaccatgctgaaagaccagcatggatcccttctgtagggcaatggtaaccatttccctcttaaaggtaccactcccttcagatgctatgacatccaggcaccagcctttatggaacaagccatatccagatcacagcagcctgtcacatacccttccaatgagacattctctaatggtttattttggactcacagataaactaggacaaacaagctcctcctgggggctcatcactgtcccttaagcctcttgaccctacagtgcttaatctttagcacgtaatgtctgtacagatgacacaaatacccaccaaggacatggcatagttacggcctgatgccatctaacagctacatctcagaataatgattttaaaccttgagtgtgtccacatttctttaaatccaagaaatattttaagatgagacctgaacttcccccgtcttcttttctcttccctatttggattttctccatccctctatttattctatgaataggaaaagataattcggttaactccttgccaaaaatgcactcagattctcctgcaagcacttattttaagtaaagaagcacagtagtaaatgaagaggagagacagttcatggactttattttagtctctgtgccttgcagcaccgggctctcggggacatgttgatctggctgctggctctggcagatgtttctgtctagggacaaaagtcatcttctcttttatcacactgggctagatctgagagctccctctctgaatggagacacttctgctatgtggcctgctagtgagctggggaaggggagtggggacaagaatagaaaccacgttttaaaagtcctgtcttatccttacacaggctgatcgttgccttagtggtcaggaaagttgattctgagatctgattctcaggaatcaaaaaaaaattttttttctgaaacatctcaggacagccaaacacataatttctgctgctctttcttacattttaatctcccttgtcatcgtcttaactgatgttctcaagagagccttgtaacagactcacaggcttatgatttatgcacagttactaaaacctagtcgggagttgatagcatacacctataattgcagcacttgggaggcagaggtaggcagatctcagggagttcgagcccagcctggtctacagtgcaagttccagaatgggttccaaagctacagaaaaaccaaaacaaacaaatgaaaaaagaacgactcaaacctcgtctgagaggctgggacctaaggctcttgtcaccttcagatttggaagcgggtagtctatttaaaatctaaaattctttccactttatatgaaaacaagtgtgatttgttgctttattatccccatgtgtgtatatatctatatatgtatttatagacacatataaacatgtttcagcataactagagtgccaattaaaaacatgctctcataaatatttccatgacttcaagaaaagtgaaatctcatagtttattttaaaatgcattaaaattgggatcatagactcttcccagaaatggaaagtgcactttaactgtagaataattatgatctctagtttcagcctgttctgcatcaaaaacaacgttagacaaaccagtaagcctttacatgctagtttttgccccattacaggagcccatgggtatttataacttcgcccagagcagtgtccttattgcaaaggacactgtgtgaaagcactttgaacacgggctgctcgcacagctcaaggttattcactcccgtggattctctgtgagttttgccacatcacttacagtcaacatccactgtgtgtagactgcatggggccaggcatttcccagcaactctgttttccttggttttcagccagaggtaggaaaccaggagacttaatgacctgcccaaagtcacactgctagcggccctagtctctatgtctcagggaccagatccttaatctgctgcagaatcgtggcacctgggaaggtgctgtggtgtctcagggatctgtcctctgcagacctacacagaattaaccctgtggcttataattttctgagggggcagggcaaaagagaagcacttgatcagcaaacaaatgattggcattcaccaaccaccaggctgtgtgagcaggcctgtttccctgcttcagtctggagccatgaggtactgcctgagagagggagggaaggctgtagaggctgaattgctacaactctagcatttaccttgaacatgcattaaaacagtgttggcattcacacatgttggcattcatgtagcattctctacacgggactcaggaaatcactgagaaaaatatctgagcaggcaggagaggcagtgcctcccagaaacccatactaagccaaggcagaaacaaacccagaccctttaaactcttactgtttatggatggagcataacaaatgaggtcttgggaaatagtgactacttctgctcatctagcccgtgaggtggggaggggaggaggggaggagggggagttagggaggcctggcctgcattgctgctgcattgctgcggcattgctgggagctcctctaacactcactttaatatatggggggatatcacattttccctcggtgctgcatcctggacgaagtccgtctcagcagagtataactatgaaagcgagaaggcaagtgagagagatcaggaaggagcctcgtctgtgacccctgacctcctccagtggcagttctctctgcctttgaacttgacagagttagcgcttttgcatctcggagactcctcatcccttcctcctgtcccatcaccgatagataactccgacccgtgtgttcattgtgttggcgatgttggcaaagctagtacagttttgttgtctgtgccaagagactctgagacacgcctcctttattgtcggtgccaccagtgtacccagtggcccgaaagacaggggatttgctgtgtgacaggtcagggttcagcacctgccaactgttgaaatattgcttgatttgcacaccagaaagcccttggttgaatcttgcttcctcttgatttgttgtgtttttactatcctggggatggaacccatgtgttctacaacactctgacactcaactgtacccacaattcctttttaaaacagccttgagagtaatcagaattatacatggcttgtgtatcacagcccaatttctacacatgttttctaaatttatggggaaaggcagggcccttccagttcagccaagatctccatctgggaaaacagaggcggccctagctgccccttgatgggaacagatacacagtggaccatttatggaactgtctctcaccacttaccggcttctctaataccctgcctgtacactggacacacacacacacacacacacacacacacacacacacacacacacacacacaccattagggtctcttttgttttgtagtatcattttggctcctccttctcatgtcctccagcctggcccggatgactggttgctttcagcatgtctgaggactggaactccccaaggcagtattcatcccctgtgctcatagagtctagtcttgcttcatggcagccctgtgtggaggtagagtgctctccccatgtagatgagcaaaccagagtttaaggaagtagtctaaaacttgacaagtagtgagttgagaaattgggtttgcaaatcaagtccaaagtccaggtcatgataatgaaatcactccaccgtatgccggtatgccaatcgcttctcagctccagtgcggcttcgttactgggaggaaaagctgtactttatatcctgcttcttgggacaatgagagtatttacagttttcctgttggattagcaaacgatgaaaaacacttgaagagtctgtatttgtataacacttcctccccaccaatggctttttttttattagttcaaattaggaacaagcttgcttcacatgtcaatcccttctccctctccctcctttccccccaaccctcctcccacccccacctgcccccatccaatccaccccctttttttttaaggcagagttttgctatgtggcccagacaagcctcacactctgaattttcttgtctcctgtgtgctggggttacagttgtacccgaacagcatttacttcctctgcaccttatgggtggcccccacatcttatgggttgctccaaccccagctcaaccaggcctcaaccttatttaaccttcagtgtgatctccaattatcagggctcctaagggcagcgtctcctcctgcatgaggaagcccaagaacccagagaagttattttgtttaaaattcttgccttgaagttttttttggtgaaggagccaggttggaaaccataccagaaacagttgtgtttcttagttacactgtgatggagggactgtaactcatggccattaaattgcttccctttgaagtataagaaaaagcagaacaacatttacagtcctttaacccacaggattacagtacacatgaattaaagtcaaatgtgttaggaactctcccggtaccatggctggcagaattccatcttcacccttcactcattaattggttgactttcaagtagaagctgggttgggttgggttgagaaccaggaattcagaaggctttcccgagctcttatttagaagcaggaagtcttcctatggccgcttcactgagatcgagaattgttccccgtctcctagatttaatcagagggcagcagaaaaggaattagcgtgcagcatatcctccagctgtcatctccacagcagccctgtgacatcagcaacaccgctcccatttgacacgtgggaacaagacaaggccgagattagatagcaagcctgctgttccagatcccaagtcatagctcaggcaaacacagcacgcacttttgcccctgcactggtttgctccccagaacttgtatccgaggacaccgaagcgctgatgacactggttgcattccatggcccaatattagcagagaaatttacactcttgtatttcttattagggagtttcatgggggaaattgtgggtgtcaaaaagcagcagaaaatgagtactagcacttcatggctacatctgaggtatttataccacacgtgtatggtgagcctatgtccgtgttgcatggctgttttcactcaagtcttagtggtcgctgagctaatgtgaaggtgtgaggggagaagggtagttctgtctcccttgtgtggagaagaagtaacccataagacataagacccgtgaaattaggctgacgtgtttattggtagcacattctgtcacctggatttattgtctgggaatcttttcaatacagaattgatcctgaatggttctaagtggttgtaaaaaaaaaaaaaaaaattccaccactccactagatggcggtgtggttgcatagaaacacttgatgccccactggggcttttgcgagtaggtgagaactttgtgttgggatactccaaggccaatggagtatgaactggaaacctgtggtgccctggttgtttgctgttctgttcccagcacctctgtgtgtctgcacgtcttcacttgagacttctttgcccttcactgtcttcttgcaaggccccgcccaccacccctctaccagtgagcctcttctcctcttcacacctcatttttctttgttgagtccttggtacacctccatcgtacactgtaccactgagatgtctgtttgtgtaccctgcggtggaaacaggtgaaggaggcttcaaggaagtggtcttcccaccctctagactggagtctgtccccaaacctggccgagcaagctcatcttcctgctgaatgttgtaaagaacttggtgctgtctctgcagcaataggtttgggtctagaaacgcaatcctcgaaaggctagagactctgcaaaaggctgcagaatgtgggaggtgccggagatggtgtcacgcagaacacccataatatcttctctggaccatctacaagcacagcaggaagggagctgccagagactcgctaaatcttttcttttaaagtgaggggagagggttctagaggcgcccagtctctctcttccctgcagggcagtattctgtgccaagtagctgccagctctccagagaaggagtcatgccatgcaaaggcaggaacgatctgggaatattacttatcgaagggtcttcagtcctgaggagtaccagacccagatgtgacctttgcctgactcttatttgtagttcaaaagcaggatcctggaaaccgttgaagacactgtcagtcttccttgtaatgcattagtcatcgctgtgtagaattattcttgtttctatcttcaaaccacagcttgcagagccgggatcatgatataaaataggcatgattctttgatttggggaagggcgcctaatataaaaactccccagctccaaaatgggatcagttcctcgggtcccctggttccaataatgatgagtttaacatgtttttttccataacacccagagctgggagaaagtcacaaatcacctaccgcctgaaggtggaagatgggttggcaggaagagaaggtgcttgtgggaaccaaagctgtgggtaggcaggcatgttgggacttgcttggagtgtttttcttcctggtgcaattcctcttctattgacacaaagcttcctcgctagcagtgcttcctggggtgtcacttaattcacacggtcaagtttggagatgttcaggtgaatcagttggaatgcagtgtttggaaccgatctggccctaatgttggttctgtagggatcttagaagtacataccgtcatctctgttcctctgtcagatgagtgggaccccagaactttctctcccggggcttggctaccaatatgttgctgagtagtgtttttcttagtgctatgacgagacttcgacttggatgaagcccagcagtggcccatgctttcagtctgtgtgggacgtagaatgtgattgtctcattttctagctttctgtatgtttcaagcccaatgaaagggtttgataagttttcattgatattgtaataccaaatatgcccatagatttcctgcagtttactagtcaagaggagcctagaaagttatcaacaacaatctctgtttccttagctagtgaggagcctagaaatgaaattccttaattaaattttttggctgtgttgcaaaaataaaaggtccattgtgtaagggggggcatgactttttgttccccaagaaaggtatttagagtttggggatattcatgtcatctttggttgggacactctgggacttagtagggaaaaatggaaggtgagaatcctgaatcaccaccacctcccccagagagagacagagacagagacagacagagagacactggagaaaagatgggcaagaatgatttccagtttctgtcctcacatccttccctcctcactctcctttttctttctccattcccttttctatctcctcctcttctgggaagaatagaactgagctgacttctcagtgtcccatctgtcttgcttgagggtaggaaacagggtggggcacaaggagcaaagtggctgtttgtgcccgcctgtctgcagcctggcgctcacaatgcctccattgacaaggcaggcaccaagatttatgtatcttaatcattatcaagaattcttgttctgaggaattaggcaagacaggcgtcttcaatcagtgattatgaagtgccaaccaggagtcaggagcagtcacaccttgtgtctgtgactttcataccaaccctatgaggcaggtgtgtcattcccctcttagagcagaggaactagtattcagacctttaagacaacccgaggcacattgccaggagccttgcagagttaataaatgcttgtgaatgaagaaataagctaaacaagtaattaagtcaggatttaaaaccagatcttgtagcctcagaccggccctctctcccttattgcttccctagaagagattgggatgagcctgaagatcggtcgtgttctgtactgtttattcaacagtttgcgtttgactttgaaataagaatttgttggcttcatcaacccctatcactctcatttctttagcctgtaattgcttgtacatctcttgccttaaccctcctcctattttccactagccacagctttgttgttgaagatagcacttctggagtcccagcttcctcggtataaatccaggatttggtacttcctagctatgtgaccttggacaaattacctaaacactgcgtatctggggatcactaaacttaaaatggagataatagtatcacctatcacaagaggtttttatgaagtttatgccagtaaatatgtacttaataggttttaaaaataatgttagctgggcagtagtggcgcacgcctttaatcccagcactcaggaggcagaagcaggcagatctctgtgcgtttgaggccagcttggtctacggagctagttacaggacagctaggactgttgcacagaaaagtcctgtctcaaaaaaaaaaaaattgttattgtgctggctagttttatgtcaacttgacacaagatatggtcagcagagaggagggaaccttaattaagaaaatgcctctataagatcaggctgtaggcaagcctgtagagcattttcttaattagtgattgatgggagagggcccagtccattgtgggtggtgccacccctgcactgatggtcctgggttctataagaaagcaggctgggcaagccagtaagcagcaccccttatggcctctgcattagcttctgcccagcttgagtttctgtcctgacttttcccaaagatgaacagtaacgtggaagcacaagccaaacaaatcccccccccccagattgctttgggccatggtgtttcatcacagcaatagcaaccctaactaagacaattaattatgcattctctgagagttggagacaaattattttcatacaatatattttgattttatttttctctttccccaactcctctcagatgctctccaacatccctactggctcaacttaaagttctttttcctcttagaaaaacaaacaacaactacaagactcatggagtccaattgtgttggccaactattcctgaatgtggttgatatacccagtatcaccactgaagaaaactgattttccttctcccaataactaccagttgcaaataccttcttggttctgggtggaacttcatacccacttccctctcttcctctgggttgggattctgtcaggcttaagcacgtgcagatctcgtgcatgctgccacagtgtctgtgaattcgtatgtgtatctgccaccttgggtctggaagctgctgtttccttgaaggtcatccactgcttttagctctctctgccccctcttgcacatagatccttgagctttgggggtgggggggtcctgatatagacgttccaattagagttgagcactccaaagtttctcattgcggtgaccagttgtgggtctctgtgttaattaccatctactgcaagaagcttctcccatgagtgttgagtgatgcgctgatctgggggtacagtgacatgtcatttgggctgttttatttatttttctatgttcatttagcaaaataatagtagtgggttttccccttagagcccatgaactgtctagcctgatattcttggtacccatggaggtatcagatccctgtgactggcatcatagacaactgtgagcttcgtatgtcctgggaattgcacccgggccctctagaagagcagatagaacacttcaccacagggccttctctccagcccccaccttgtgtgattttttttccttcctttttaaaagaggtgccgtaattgtaacttagagctgcctgtggctaagaaagtcttgtacactgagtgacacccccatagaccaaggacgtatgtatgccttatcttctactcactcttcatgtttttgagtaatctcagtatgcttgtaactttaatatgattttcttccttaggttttgattttatgtttggtcatttggattttctgtttaattttgtgggggtttggcctgcatgcatgtggtaaaatatataacataaatgtatagctttgggctgtagagatggctcagctgttaaatgctaggctcacaaccaaaaatataaatgtagagctttaacctcctggggccttttctgcttatttttcattgtcttggtgctggatattgaactcagggcctggctcatgccagcatgtgcctggccaccaaatcctacccacagcctccattttaatcatttctaagagtgggattcattgccattaattgcatttgcaatcttatgcagccatcaccagcatttataaaacttcattgcctagccaaaaaaaaaaaaaaaaaaaaaaaaaaaagaaaagaaaaagcctctgtcccatttgatagcttggtgtgtaagtgcaatcacacagtgtttggtgttgtgtgtttgtctttgtttacatagcatagcatgatgtcttcaaggttcatccacactatagcatgtatcagaaattactgcttgtgattgaatcctctctgtctctgtctctgtctctgtctctctctctctctctctctctctctctctctctctctctgtgtgtgtgtgtgtgtgtgtgtctgtctgtctgtctgtctgtctgtctgtctgtctgtctatatatgtgtgtgtagtgcagtatttttatcgttcatctgtggtagtcacttcatctgtttcctctggctgtttgatcataattgttcttctgtgcacatggatgtgtggttgtgtgtctcctgttttcggtgtttcgcatgtacctagaaacagtgctgctgagtatccaagtgattctatgtttaactttttttttttttttttgataacgtccaggctgttctctattgcagctgcaccattgtacatgttcctcagcatttcttgaggtttccaatttctccacatcctcaccaaattgatttttcatttttttagtaatagccacctagcaattgtgttgtggtatgttcttttgattgtatcattgtctctgggtaacatatatgagaactgtgtccttgtaagagtcatgttggttgcagtgtacttttgactgagggttagtgatcttgcctttcccaaaggcagatgagagatgaatggatgtcacttaagcacaggctattagcaggaagatgtctccttaccttcttttctcttgatgaaacacagtgagccaagccttagaggaggcagcccatgacttttcattctggaatccacttgctcacaggtgttgcaggcctggccccagcccagcataacattttccctggaggaatgcccactgtggattttcttgtctgcagactctgttgttgtcagaccttacacacagactgagggagcattcagtctgccgggcattgccagctggtgcctgtgcatgaccccttggtggagtgcctgccagagagggctgggagctctgcagggtggcttggagcttgcaggcacatgtgggtgtggctggccctttcccagctgtcccaatcgctcctcgttgggcaaggccttggttctcaacccttaccttgggcctcctcctgtgtcttgacactgacactcagctgccttgagtcttccctcctttcttggtgttggaggtgataaccttctggggaggggatggagattgcttgcacacagaagattgcatggctcagtggcctggaagaagcacctgacaccagacctctcactttgcactgccccagtgcacagcttggttttcctcagggacaatgctccctcctgctattgactcacagttaagatgaacagtgtacataggtgaaaggatgctgccagccaaaaagaaatagtggttattgtcagccatctccatagaagccttttgaagagggagctggtcttccatgatgtggtgttgccaagcatgagtgtttggttaatgagtatgaggaacatttagataaatgctgtattttgtttaacctgttcatgttttctaataatttaatttttcaaggttacacttttacctgtgtttctttaacaccacacacacacacacacacacacacacacacacacacacacacacacacacacacacagtattttgtttagtttgagatgggatctcattttatagctcaggctgtcctgaaactcactacattccccaggctggctatgtgctcataccagccttaaactcatggcaatcctcctgcctcagccttctaagtgcatgcactacccagtttttgaagtttcgtcatgtttgtcttctccctctcactggccctcctattgttttaacctgcttggtgtaaggggaggtggcaggtgaactaagtgccccttgttctcaacccaggttgcaaacttcacttgctggtcaggatcttccctgcctttgaaacaagccctgaactgcctgccgaagttttaaccctgcattcaaatgtgggagttgaccgtgtaacaagaaagaagccttgagcacttggctctgaagcatcaggagaaaatgcccactacagaagatgaggcagggaaaaatgtgcatcccaggaagggctaacaccccgtgtgccctctaacagaagcctaatcagaaacctgctgctcagtgctcattcactgtccagtgcctttgccctgaagccccagcccccaggcaggtgacacttgacttgcagtgtgatgagccagtctctgattcctgatgctccagggtagacccgggaagggctactgagaagtagagtgccctgaaggacatgccatggaatgctgagtgtggattgtaatctcctggagcttctaagtggcttgcagtatccaccatatctacttagataactcagtagagagctgagtcaagggaacacttctgaccttacatttatttttgtaaggaaaagagcactaaccagaaagatggatcctttcccctcagaactaagctgttttccctaggtttctgggattttgcattttgaatgagcctttgggtggaatagcagaactgtaattagatgcctttttgatatatgtatgtgtatagatgtacgcgcgcgcgcgcacacacacacacacacacacacacacacacacacacacacacacacgtattaaaatcaatgattttaaccatctttaagtgtgcaggtcctcgtcattgagtatatctgcactgctgtgcagccatcaccacctcaaatcatacttcttaaaaggaagttctgttcccatttcccctccgccagctcctgtgtctgtctttcagttgtcttgtacttaggtgactgctagttaacatttttaactttttacttgtaatttgtaagaggaatcctactgcttttgaatcaaaatttgacatttctttttctctccctccctctctctctttttaaaatctactcttgtgtgagtcccatcctggtagggaactgtggcctagaacacaaatttagtgctgaactatagaagttcaaagctcagctggctgcaatgcatctttataccaaggaatgggcctctctgttctccatccttcacagcatccacagtgtgaaggctgttcccatccctgtcagcatccacagtgtgaaggctgttcccatccctgtcagcatccacagtgtgaaggctggtcccatagggtgcagtggcttacatagtgcctgacatttaacaaacacttcatgttacccactgctacccccaatgttgttgataatagctccatcctgattctacaggatcagggaaattagggaaactgaggctgtgataggtcatgggtgttagggagcagcagacctgtgagttcacagagcctcacagccacctttccagagctgtgctgtgatatgctatgcttccctcattgaaatggtttacaaggtgccagctggcctccagcaatcctgcttgcagataatcacaccctgaatcagcctgtgtgaccactcaactacaacagacaagccagttgtggtggtgtgtgctagtaggacttgctgaataggtggaggcaggaccatgaatgcggcaggaagaccttctcaagattaagttgggaaaaccgtggtttctgctttggttgctctcttcttgatcaattatttgaacagaagccacccacccaccttcttgcagcagcatcctagcgagacacatgtggcagttacctggaacagctgtgtgtgaaggagacatgccaacaaccaccagagtgatcacagatcctacagcatttgcccactgttgactgtggcttctgttgatagtatgtatgacttggatctgaagggaccctgagctacaccatcagctaatatactccccggcttctgaccttctgaccttcagatctgggggaagtagtaatagctagcaagcacacctcacttgtctttctgcatctctttgtgatcaggccgtttttaagctatgattcttctcttgttcctgtcttaacaatgatgacctggtgcaaagcattcactcctgagtgtgccattgcttccacgggtggtaagcatcatgaaggaaggcagtgctcagggctcctcttggcacctgcaacttagaaggattcagtaagttacagttttcatgaatgaatcagtgcattttatccacaaatagaaaagaagccaccatggctgaagcatctgcttagtcttttatttgaatgagtgtttggttgttttattggagcacttagctgagattcccacattggatttttggtaaatttttataagtttttattcctaatatacatgtaacatatggccatgcccactatttatcttcatttcggataaactcaacagtttctttcaagtggcattacctagtctggataaggattgttataagtaccaaagagtcagtaatctcctgtatgggaagaaagtgatcaattgtggatattgccatactaagcttccacaaactctgtggctattaaaaacctataaatttatcatctttacagcttaattaatggaccagaaatccagcgtttgctccattggactaaaattcaaggtgtcagcaggaggttctgggggaaatgtgctccatggcctttaccagcttctagaagccattgcagttcctcagctcagagcccttaccccagagcaaggcaattcatcttagccaggaccctggtctgcgggatgcatcctttcccagaagataaagttgaacattggaataacaaaccactcagctgtggcttgggttgcagatttcctttctaattgctgctgtcagtaaccaaatcacttcataaagttgcactggaaattcacataactttgaatagagggaagtaggcctgggaagatgtctgtctcaccattttcctcactaaaagcttctaaacaaacaaacacaacggatttaggagaagcaccactctgaggtaacccaggatgatgttagaatctagagttggaagacagagaagtcatagaatagatgtcttagtgtacctatgttctcactgagatgtgatcctcacagcagtattgtactagtgggtttcattacagctcctctgtatagcatggatactgcagtgggtggggcaatggtgggaaaagggatggatgctccaaagagccaacaaacatctgcttgtagaaagcccacatagatgcctgacttccaagagcatagatatcatatgatagataatgcagtgttcgacatacattgaacacctagcacataccagctgatatttagatttttacctaattatccctgatacttaacagctttgtaatataaacattctttaataattgtaaaactgagactcagagagaagcaataaccagaccaaggctacatacccaagaggggccgagccaggggcaggctgagcatcctgtttccagagccttctgcattttgcactctgaggcagagagctctgggagggttggtgtttggtttggcttgctgctctgtttagtaatgtaaagtcaggtctgccccctgttaaatcatctgtttgtctcctgctgtagagtggcagagccctggttctcacaccgagcgtggcgtggtaaacgcacagcttcttgcgtctacgccaggttagctaagtcagattctggaggtagggtcgggaaacagttttaattattttgttttttaaggtccagctatgcttctctgactcaaatggttctgggaagtccttgggaacacaagcagtctcttctcccccctgtaccatagacatgcggatattgaaagcagtggtgtctcacctctcatggttcttgccgtcccaggctctggtgtgccaggagcaaggcttgagatcggaaggaccagattgaagtctccactgtgagcaggtcactgctacaggagcctgggcagggctctggagcccctcttctttgtaaagtagtgatgatgaagcttaggccatgagatgcttaggagaactcagagaattctttttttaatataattttttatttgaattagaaagattattttacatgtcaatcccagttccctctccctcccctcctcccctgcccccccccactaacacactacctatcccataccctttctgctccccagggagcgtgaggccttctgcagggagtcttcaaagtctgtcatatcctttgggatagggcctaggctaacccccttgtgtctaggctcagggagtatccctccatgtggaatgtgctcccaaagtccattcctatgctagagctttgctcataggaagcttgcaaaggctgctgcttgttactgattgtttacttctgctaccgtcagttttgtttaaggatgtgttttctagacctctatgtttttaacttccaatttttacatgatttttaaattttattttatgtgtatgtgtgttttgcctgcatgtatgtatatgcatgcctggtgctgtcgaggtcagagagggtgaagaataggttgctgggtcctctgcaagagcaagtgccctcaactgctgagccatctgtccagcctctcgcctccagtgtttattgttttctgggcaggctctttaccactgagctagctatgttccaagatctctcttttggtgttttctaatttttctttgtaaatatgactcttgtctactttctcaaagggtagtgatgggtgtagatagccaaacaaaactctagatatcttgccacctcagggacccatgggagtatcaaatcctgtgctctgaggatgaagcttctctgtatacagagaagacagacactcaccaccttgggttgccctgtgttgttttcattttcttctgggaagttttcagtggaagatcacaggaacatctggattcttccagtttggtgggtattggcctatgcagtactgggaggcatgagcagaaagttggtttcatcatgaaaattgggttgtttccacactggtgtgattcaccttatctggtgtaagatctgtcagcagtttcctgtttggtgacaagtgatgactaacttgaaactaggtctgctcttccacagagagccagcttgccccacgacatggacaccgacatttacgtaaaatgcagatgcgctcatttttgtctcttggtttttgcctcttgagtcccaatgtgttcattcagccgagccagttctctgtcaggtatctggaaggcaagactaagcatgggattggcttgctgagggtcacacataccctgttttgaggcactcagcgtattgtctaagtgctgacacatcactgccagctgagctgtgggtgttcccaggtcaccttcacccagggaataccagaggggaaaaatggaagtttctgtcttagatgatgtgtagggagggttcttaggttataaaaccttttctgagaaccgtggaaatacctgaacactccatgttgcagtcagccaatgaagatgtttactactggccttgaaatttgcataactttgtttatgatgctacaatatagtatattaaagcagctggactcaggaggggtcaggaaagcaatctgtgagacttggaccagctacagggatgctgcacagttgcacatggcagaaatgcatctcagggctactgttttcattagaatgtcagaagacaagtgcacattcctttagaaaagggacagttccctaatgccagcatctcttagttttcttctcccttctaatgatggagaaaactgttagcacaggcagatggcagtcctaaccatcaccaaatacaatttcagtgtctctttcctgagtttgcaaaaaggaatgacctggagactaaccatgttctgaaaaaaacatgctattgattgtctaaaaattagtagaaatgtagtagaaataacaaaaaagattatccatctgcctgggggtattctccttgtttgatgtatgttacttgaaagtcattgtagtagggttcatattttggtgtagagttgagtctcagtagtggggactcaaggtttttcctttgaacaatgcaacgacaagcttagaagaagaacattgctttaattgaggtaggttctagcagaatgggacccagaagggggcctgaatccaatagtctaaagaaagattaaaaaaaacagaatgctgatgagggggcttaataattaataattttccaggaatgtagactgtactatacatttttagataggaaaaaccataatatgtccaaatctgtaattcaattagttgttttttatcagagctcagaatatgagaaggaagactaaaattgcactagagttgaaaactttggtgagtaacagtggtgagccatctgaggatttcccagagaattatcatttgaagttgcaaggaaactctatctgtggcgtagacatcaagcagatggagcctagggcgaagaggcccagatgtaggcatcgcattgcatggacattgcactggtccaggtgagatgatgttcattggttttcactagagcagaggtcatagacgtgggaacaaagggacaaatgttaggtacattttggggtgacttggataggacttgggatgtatctggacaggagagatgaggattacttgtatgaatagtcagaaggggcttttagtgagtagagtgacaacgaggttcacgagttcactcagggtaattttgacacacctgctagacaaatgcattgtctaattgcaactattgtatgcatttgaacttggagagaagtcagggcatagaccatggttggaaacaggcatgtgtgagagttctcaggcaaatgcacagcatgaggagaaggacaaagatagggcctgagggaatgccaccacttaaggggagagcagactacacacagccctcaaaaatcaaagactcaagggggatattgagaagggaaggtggagcccacaggcttgagagaagacacaaaacccaaaggaggggagcaatgtgtgggcaggagaacagtgccagccactgcaggaaattgagaaatattgtcttcagaagtatccattggcctggaaactactactccgtgggatcatagaatatgctggctgagccacttgagcaagaggggttggttcatggcaaggatagaagaattgtatggagagcagtcttataaaaaggcgggtatgtccagaaagacagagaaacatgctgcatccattcccaatgaagacaatggggagttttgttggtgtttaagatgttagacatttatacctgtccatgtgctccaagaagggaggaatgcagacggggagactcaagaatgtggactgagaaaagaataaccagtatagaaattcctagatcggtaaattccaaagtctgctatggggatgcctctatcagtagcgctggggatttgttagaaaagtaaatgaaccatctctacttcagacatacccaacagagtctctggtatctgggcttagcatctcctgttataattcaagatggagagccgctgatttagaggcactacagggttgggggcccaggtgtactctctgcactgggccagcaaggcacttccctgcaggagccatgttcaaaaaggttcatggtagacagctggagggtgaagtttactctcaagtcttttttttttttttcctttaggatgaacaacaaactcctttttttattcttttctttattattttaattagaaagaaaattattttacatgtcaatcccaggtctctttccctcccctcctccccaactaacaccctacctatcccatatcctttctgctcccaagggagggtgaggccttccatagggggtcttcaaaaatctgtcttattctttgggatagggcctaggccaacccccttgtgtctaggctcagggactatccctccatgtgggatgggctcccaaagtccattcctatgctagggataagtactacaagaggtcccatagatttccaaggtctcctcactgacacccacgttcatggggtctggatcagtcccatgctggttcccaggtatcagtctggggagcaagaattctcccttgttcaggtcagctgtttctgtgggtttccaccagcctggtctggacccctttgctcatcagtcctccttctctgcaactggattccagtccactctcaagtctttatgtttgtttctaagatagaaaggagctctgtctactgcaggccttgggataagagctgcattgcttgaatgtattcaaaagtcattctaggcttaggaataccactgtctaggctcctggctgaactaaaatggttagtttcaaactgaaacatgcgtctgttttctcctttccattcttgtcctggtcctttctcaccaggagcaaactgtacttgttgatgcctgattcatttgagccacaacattccattacagtagtctttaggacagtagtctttaggaggttgtttgtttgtttgtttttgttttttaagcacttttgacttctctgtcatcctcaaaagctcctttcagaaggttgctgagatcacatcatccggaaccctaataagcaagagcacctgccaagcttccatccaaccacacaggagacccagatgtgggacatcattaatgttcctactcagaagttatccagagaggaaaataatgtagtttttaagacaaaaagtcaaacaattaaaaaaaaatctgctgtgggcatctggttggactttggatctcctcagatgtgtttcctagctggccacgagaaggtggtccactgtgaattctgttgtgcacagcactttggccagcctggctcttatggaaaatggtcagtcagactgatgtgattagtcattcattttctttttctgtcttgagtctcattgacaaaatgcatttgtatcttgtatcagaggcaagcacacatgtccccccagagtgagggactcagagaagttgtcatgttctcaaagccgaagtaaaggaagatgagatatggaagacaagccatcttgtcccaggaaccttctgtgtcaagcccttatcctctggaggctgggggcaaaggtcaggaatgcagcaagtcacctgccttctttcagggtcccagttatttaaatattcatgtcgggagtgttcagctgggtttcccagggtccagcctgcttctgagcagactggcactcctcagagcgatgaattagcactcatcctgtgtgatgtgcacactgtccttaaggagagccgttagtgagagctgcatgttcccataggacctggaatttcttaaggacatgaatctcttaaggacatgaatcgcatatgaattaggtagacttgcaagatgattaattttggaaagcaccaagccgaaattccttgctaatattttgatattagtttctttgatacagcatttaacttacaaatcatccttgattgttatgtttgatcagctctcagacattttggctgtttcttatttgattcaaaatgcagacaatctgccactttaattctaagtagactgttataactgcaaaattaaaacctacactattgttgaagctgccaattccttactatctgaaaagcagaagggagaccatgccaggattttgtaaatttaaaaaataacaatgataacaaacagctctacaaagttcctaaagagaacatcacagtggactgtgcaaggagccaggctggagagctggagggttccctgaccaagcctggaagcaatggtgaaagtaaaacacagaagacaaatagtacccgattctttctttatgcagaaagttctgtgtgaccattttccaagttaaaggaccagtcctcctttgagtctaaccataaacaactttattggtgccagtacttgtgcatgttttccataccgacacaaagtctccttctcggaaacccctgagttccccactctccttgggttggcttttttctttcagatctggaaatctttaaaacagttttttttttttcttcactcagtacctagagcctttgtgtttataaacgtttggcttctggcagctgttttgggttgaactgtgtgtgtgaacccaagtggcttccctagtgtttatcctcctacagcatttctaatgtaaatggatagcaaggaaagattttggttgcttcttctcccttaagtccaatctgtcccgacagctccatgtttccaaattcattcattcattcattcattcattcattcattcattctttctttcttccttccttccttcctttctttctttctttctttctttctttctttctcttctttctttctttctttctttctctctcttctttctttctctctttctttctttctctctttctttctttctttctttctttctttctttctttctttctttctttctttcttagatttatttattatatacacagtgttctgcctgcatgtatgcctgaatgtcagaagaggacaccagatctcattacagatggttgtgagccaccatgtggttgctgggaattgaactcaggacctctggaagagcagtcagtgctcttaacctctgagccatctctccaacccccgaaattcttataatgattatatctggttgtttgtccagtctggtttccacaaagggcttccaggtagttagccaagggacagccactcacagtgccttgtggttggggaagaggttcaggacctgagtccagctccgtgaggactgtgcctccactgtgtgctgtaggctctcctgtcagggatctcgatatgtctttgtgaaactctgtttacaaaagcagggggctggtgtaccccaggtagtagcagtcctgtagggcatcagacatgtagcccagtgtggacttgggcttggttttcagactgtcaggcactccttcagttggagtggggcagccagggagaagaagtgcatttctgagcatccgatgctgcctcagaatcattgactgctgcattagtcatcttctcaaattgtttccttgggtttattaggtttcttcataatccaagcaatggagtagcaacctcatttgttctccgtgtcatgagtctatgagaagcagaaacaggcggacccagccattgagctggcctgggagaaggggatatgcactcgttgacttcttccctcacaggaagacctctgctttctctgtgtggttcctacctgatgtgcacagccagtgaccctgccctcacagatctcctgatcactggagtcagtagttgaagtagattcctgccccgtgccccagctgtgtttgactacccagcacatgtgttcagagatgacagtcggcagtccatgaagtagttctgtctttcctccctccctccctctctccctccctccctctctctctccctccctccctcccctcctccctctctttctctccctccctctctccctccttcctttcacccctttttacaaaacaatgatgaaatctacacacttttaaatctagaaagtcagagactacctctagatgcttaacagtgtgtaagtgactgtttttgtgggaacatggctaacttgtggttggtcatgattgtttctaggcagtttctacacatggttagttgcccgcacacctcccataaactgttttgagcaccttcttttgtgatgggttccctaacagacatgataatgggtaagccatggatcttgactgaggggaatctgaggagagaagcgaaagagaaactgacaggagtgggtcagggaacatcactagctttctctaaatgccctgcctttctccatagctccgcattctgtcagatgctctaaggagccagatgccctgctgtgtagactctaaatagtgagatgagaggagcaaggactacacctcatgactgcacctggctctgcacctcacttgccatgtgacccgggggaggtgcttcacttctaggcacttctcacccagctataatagggatactgttgatcgataccattctgttgagcacagggattgagagcatatgcgcaagtaggtgctctccagccaagagcatcatgagagcagtgttttctgccttctaggtgcttagcttcaaggatgttagcatttcaacagggaaatagggaagtgtctagaattgtggtgagtgaaggcaaacagaagatacgatgtgatggagggaaagtcaaagcagggttctccttaggctttgtgggaaagttaaagcagggttctccttaggctttgtgggaaagttaaagcagggttctccttaggctttgtgggaaagttaaagtggggttctccttaggctttgtgggaaagttaaagtagaattcaccttgagctttgtgttccagcctgggttttccccagctagcctggagaagagatggaagtttgagttggttgttggatagtagacaggcgtggtcaaacagagcctcctaggccataggaagaagttcacattttattgtaaaacattaggaagccatcaaagggacgtgactagatctaagtcagttttgaagaaaagtgattctgatagtgtgtcaatgagaggtgatgagtccaaacccattgcagtctcactggagacaggcacttttgctcaagtgtgtggcctgagagatagaaatagtttaacagatttaactgaacctgtattttcagatcttcagagagctagcattacttgagcctaggaatttgaggctagtctggataacatagtgagacttagtcacaggcaaagaaaaaagtaactgaatataatcaagatacactctcaggaacaattgttgcaagtgtcatgactggatgccatgggttagagtaagggggagggatgggctcctggaattttcactggtttctttcctgagaatttgagttggttctctgggaataatgggtgaggaaagatcagctttgggggtggaacttaattgtgttacatgaaaaatgtcactagaaagacacatgttcactgaaagacagtcttagatagcatcagaacttggacactcgccatgaaagagatggctttgagagaccagggaggagaggatggcgcttcagctaacagaacattccagagccacagtgtctgggggtggggcatggggcttgagtgaaactgtgtagacctgtaagccaggtattaatgatgacaactttgttaagatgtcagagactgtcctatggagtaattttcaactggaagaaattctgaaatggaattaatttaacatccagaacactccagtgggatttaaaccttatttttctagacacgacattttgggatcatatggcaagaaatgagtctgtggccaactctttgtgccagaaacaaaggaggaatggctaatttatgtgaaattccttatgtagatcaaaggatgtcactaagagatgtgttcctcaaccacggctaattgaaacagttgacattgtgtttgggccaacccatgccatgtgacagtgtctggataaatgagcagctgactgatggactgtaagacttgtcactggaaagatgtatgtgcacatgtgtttatgtgtgtgtgtgtgtgtgtgtgtgtgtgtgtgtgtgtctgtctgtctgtctgtctgtctgtctcccctcacaaaatgggcagctgttgctcgaatcccttttccccatctatgcatacacaataaactacttatcttagtccgcttgtatctcccagctgtaaagtagaggaaaatcttcagctatgtggctgctcttcggcagacacctggttcctagttgtgtttagcgagtggctgcaccttgactatcccgtgcacagcacaggcacccctcattatatacaactttccaatttccttctatagtcgcagctataatcgctcttggaattacttcacaagcacaaccagtaaaggccacaaggctatggctacctcatccagtgtggcatccttgagtaggatgcgcactttaagccgtttctgccacagctgatgtttttcttcagagccagccttacttagtcttctttttgaagtccagtgggctgtgtccacagggccgttcagtctgtgtggggcatcaagcgcagtgcacagtagatgtgacagtggtctgatagtacacagggctggaattacacagtgttggggtcctccagatcccgctcccccccactccccaagcccgccaagggtcagctcctcccgctgagatgctcaagagcacacctataggctatttaagactaggtcatggggttctccctcctggttcctcctcttctcctgaggccacctgggaatgctttgttcagtaaacctggacttttaatgctgcctgatctaatttagtgcgttggcggaaagacttaatattggaatgcaaaagcctctcagccaagaagctccttggacataaggtttgagcccgggaatagaaaaacatgggtgctggtgggcagctaacaatgtccactgagtcctgcgttgtagatgcagacgtggtttcgcaccttgtgcaggtggggattccgtagtttgtggtgccactgagcacggagctgctgtctaagagccctgtggggcttctggtagagcatcgcgtacatcaacttgcttgtggcttcagaaacagcaggtctttagtggaagacagaccagctttagcccactgatgctcttcccacccaaggtgggaatggacacagagtgaaatcccaatggggcaaattttatttccttcctgcagctctcgggagctggtggtgaggacaagacaccaatctgggtttgggactcatgaaaacataccgcactcagcatagagccagacacattcagatccccacacctgcatgcttggtacggttacagacagaggtcagtgggagccaaggcattgcaaggtgctcagtcacccagcgggtggaggtgcagtaattgtcagggaccacttatggacagagcatggtgttcagctctgcttccgggggctgtgaatccaaatctcttttggttagtcatcgggtatgtgaccttggataagtttctgtcttcctgagagttctgtttgcaaaatggtgctttttaagtctacttcccatgattgtctcaagcattctcagtcagggtaagcagcgggcctacaacagaacagtggttagttagatgaaacttgtcattaaaagacaaaaacaaccccagcaaacaacaggcaccaagtgcctgttatttgctgggccccagcataggaactagaactcagagatggaaaaaagggaacttgccagcctcggggacagttttcaataacagcctatgctcaggtgttctcaggaaggataatgtggtctcattagactacagtgtgtatcctctgaatagcttgtgtaaactggagatgtatggagacagtttgggtgccacaaggtattcaaatgaaacactgacatttttatttgttgttttaatagtccttatgataaatgtcaaccaaataatactttttagagacacttggtttttccacacgctctgagaggtaataaaacctcccattaatgctaatagcattctgacagagtgaagacagcggtgtgacaaagagtagagacgccttgctctcctaatgtactccgagtttcaaaacagcacaaaggaatgctctgggtatttattcagggatttgtgtgcacatttaatagataccattcatctttagccagggaaagcaggctcctggtgccttcctctctcctaggttacttgggattttctttgcccttgcaagagttgtatgcagttaagtaagtgaacccagttcggttctgagtttgtgctctgagtggtttacaaagggacggcagttttgggacagaaacagtactgaccatggaatcagacaaaggcctaggtccccagccacagctgactctacaggcaaggttcaggagagaagcctggagtgaatgtgccctgaggtctggggcagcaccatcatcctcattgttgttagtggaagccatgtaactcgcctaatgacagtcgtgttcatactgccactgtttttatatttttccccatgttttctccttcgaacacccattagttattacaggtaattcacacaaaaaccccttctcaattttcatcgctaccaggctctttgttgcttagcatttgtttttatttgcctcctctttggctttaagggaacccacaagttcttccatgacagttagcatgagcaacaatgacagcacaccatattaaccttaaaatagatcagaactgcagggttcagacctagttttctttcccaggacagggtagcagatgctagaatctggaagtctcactggcttttgaggcagaatgtatttgatacaggttaggagtctgggttggtggagccaccttggactagtacttaaaactagattcctattagtgagtatcaggagaaaaagaattggaccccagatttacaactggaaaaaggtgtggacagcgtgtaattactctacagaatacgtgaattgtatgttttgtctccacttgggatgttggcattggatttattccatagatgagagaactcagcttcagcacaattgggtagtttatccaaggttacaagactaacaggtcagagacatagctcacccatgtgcgtcaggcatctgagtctgacctgttactttaggttaatagcattgatttcaccttatattttggatgatatcctttctagtgtagtgtcaattcttcatattaaaaaataaaatgttctaatcattctttctattaaaggagaagtttgggcttgaaggatgctgtctgaagtgtcagtagtctgcctcagccccttcaggtggaagcttcagcagagacagctacagagtgggaggaagcagctcccagaggaagacccaagtgttcagagtcttggtccaaggctgcccatcaacagtgtgtaggcaggagcagaagtgaatggaggcagagtagcattgttcatagaaactgggagagggtggagaaggctaggtttccatccctttgatcccagagccaggaacacactggtcggtgtttcccagagtgttgaatgcagactgtatgctatgacaaagggtacaaagactggggaaggtaaggacacctctgtcatgccgcgggtgtccacagggtgacaccagaagtggtgagtaagtagtgaagacaacagctcatgtcgttcccctaggccagccactcccctgccggctggttttggtggctctttggatgaattagctacaaaggaagctgtttctggaaatgacacttcttccactttgggctcaatgttctgctgtcacaccaaagtccttgatttgatttcttctacttaaattaagaagaaattcttgagtcatgcctgtcctgcccctgatccaagggccgctggaaataccaccccaccgcaagcagcctgttagctggatatgacccaacacatgccaggagggcatgtagactccatatattcgcaggccagccttctttgcttcgcagagactcctttcacactacaaaagattcttagaacagtcccagacttccttacgtgccagtgtgcttttgacttgtcccagatggtgtgtcattgtcacccttcagacacatatattttgttccctttgtctaggattttttttaaatttaccttacttttttgaattttatatatgcaatgtctatgtccggtcagactttattctgcttggtgttctctcagcttctcgaatctgtggtttcacgtcttacttcagttctggagaaattctcagtcattactgtatcacatattcccccccttttctctcctgagtggcccactgcttgtgtctctgtgagagtcctgcagctgttagagattctctggggtttgttccagtatctcttctctggaagttcctggtaccgtgtgcaagctcagagattctctccctgcctctgtctggtcagctctgcccgtgagcagtatttttcacgtgttacaatattttggatcactagcatttgtttggttccatctgaaaatgtccctttctgatttcattctatctcttcttcagcatagtaattggctttccaaaatgtcctagtctggggcctgtgatatgtctaagagaataaagttgcttgctgccaagcctgaggccctgggttcaatacctataacccacatggtagaaggaaagacctccctcaagttgttctctgacgtccatgtttgctcacacacgcgcgcgcgcgcgcacacacacacacacacacacacacacacacacacacacacctgatagttaaacactcctgccatgtctgactggttttgatgcttcagactgtgccttcccctttcagcatgctttgcagtgttgttatggttgttggagagtgagcgtcacagtgggctgggtagaaggaacattatgtatactttgaagcccctagtggcatgttggtcacattataatgatgggaagattccatgtttgtttttcagtgagcctgccccgccccccgccctctgccccccagctgcaaactttatagtggatctcggagttctctttcctccagaacagcactaggcactcgtgaaaccatggcagattagactgtgcgtagaggcgtagaggcaggcattgctaagaagacagtgctctggtgttttccaaataatttgtttttcccctgtaaactcagagatttgtgagaagctggtagaattcttggaaaggaaactcatgaagtgtgtccctctgcttctgggaccggtccccaagtcttctgactcggacacttggctcgcactgggcgcccagcaatttctcatttaggctgacttttctaccctagtattgtcctgtgaagactgctctctggaaacttggggttctctgcacccagctctccatcactcctgtctgagggcagcggttttgtcctatgacctcctgtcactaacagatctaaagagttatgagactttccttttgttcttctctgtgtgctttcaggataaagtaacttctaagttcctcagctgctcaggctagaaatcacaagtttcaccctgttttgtttttttaaacaaatctttgactacttgtattgtccctcatacaatgctggcatcagggaccatgtgactacctagtagttcgtagtctagtttcagccgctaaaagcttctttactcttatggttcacatgaaaccagtttgtggcaagatcaaaaaaatgtgttttttttttgtcacccattgcaatatcatagaatgcccaggagagaggcattatcagggctctgtttctctctctctctctctctctctctctctctctctctatatatatatatatatatatatatatatatatatatatatatatccagaaattcagggaaacacagagatagatgtttggttttgtacctactgaggtcaaaccttggctcacattttttcggctttgtttcctcttgccattcattccacatgaccgacatgcaggctctgtttttccctcccccagctcatctggctgctgtgttgataggagcttggccaggctgcttgtaactgaaaccaaagccatatgggcttgtccagtgacggggtgggagtgggggcatgtataggtttaaaatcatcatgtggacagctctgggcagagacaccagacttgaggaggcctccatttccgactcctggtttcaactctagcgctacatacttcgggtcatatcagaataccctaattctttcatacacgctggccctgcttgcaagacaagtgctaacatatgcaaggagtctgagtagtgagaacgtaagccacttgctgaatattcaaggatagtgggaaaaaacaagtgacactgtgagaaagggatagagagggttaggggcggggtgacccagtggatgggaagtttgccctaatgctctgttcttagttcactgcgtggttgtccctgaaagcagttctttgaggattctttttgaagttttttttaaaaattaactttgttagtttgtttttatttaattgttcatagattatattttgatcacatcctttctcctttgcctaaagcctccctacctcccaacccacccaaccccaatttctttctgtatcgctctaaacaacaatgaaactaaagaccaagaaacaaaacacaagtgtgtttgactttccagtgttaccatgcagatcaactggagcccccgtgtattaaacctatgtgtgattcactcactcactagcattttcatttatttatttatattctaggccttgctttgagcacatggttatggcagaggacaaaacagacctcagctttcgggggcctgcagtcttataatacatattgacacagtagcacgtgcttaggaacgtctatgcatactacttctctctggctccgaaaagcactgcagtgagccacagaacttaatattcttcagagtacaagaagaggtattatatgggagactttacattttccatgaataacctaaacaagtcgagagaagacagtttcggtgctctcgttaggtgagctcattaagggcctgcgtgttgcttcttccttagcgtcttgaacccccacagctgtgtgtcttacattgctgcctatgaacactcacattttagggggagagggtgagaaggaaattgggatccaatgtgctgacaagatagcacaggcatgttccagacattcattctcctaaaattgaagttatgacctggataccttctctgagcaggctgacgtgaggaatgtagaaaactcgagaaacctatggcctgaaaatgatgttcccaggagtcagatttaactctgtcagatcagcctcgctgagagggagcaagggaaatgcccttgctggggtgtgtgagaatgaaggaaggtggcgatttctgtttgctgctggtgtgtgtgtgtgtgtgtgtgtgtgtgtgtgtgtgtgtgtgtgagagagagagagagagagagagagagagagagagagagagagagagagagagagaattattgaattatttctggggctccaaccatgagctacacccacagagttgctttgtgattctcttcctttcacaaatcctcaaaaatgtatctaactctgtctccctctataattcttagagacacgtggtaaaatttcatcaacttgagttgatcttggaggtaatgagacttaagccgttgccgtttaagagtatatttcacagctgaccttctgcatgcacatagaatgtgtcccaagaaaggggcagatttgcaaacggaaagtgcctttgtaatgcttcctttctttctccctgaagaatgcagatacaagggggaaatgtagtagttcctctggctgtataatgcctctgtaaattcagtcagctccatattagcatcgttttcaggcagaaaagatctttgtcactttagctaaggttctgctttcatacctgagcaaagaacagagacacgtgggagaatcagttgttaactaatacacgtgtttcctatgtgctgaacttgacaacaagaagttaattgttctcttgataaaatagcaaatgatggaattatcatggaccttcatcaggatacaaaatcaagtatgccagtctaaatgtatgaatgcaaaatgggtgctcccagtcagttggttaaattttgaaagctaataccagtttcctattactctcagattttgctagtattagtttctttttgctaactttttcaaaaaagatcttttatacagagtgtgtgtgttgctcctttttctttgtgtattttatacttctttgtttggagaaaggggccattagacagagaaggcaatgctggtgaaggcagagggctttggacatccatgctccctgcgaggagacagtgtcatgcacaacaagtccttctgcaggcttggtctgcggttgtagagatcatccagttggttgtggctccaaagctctcctttcacccttcactttatgatggggaatgtaattctgtgtatgttcatcttattggttgttgaataaagtactgtttggccaatgaggcagcaagttagaggggactaggagtcaaagaggattctgggaaatgtagtaaggaagtggtgatccaggcaggaaatgacatagcagggagactcatatttaagcaaggagaaacaggaagggtccctttccccctcctctcttcctccagattctccatgtgatccgtcagcaaaggaggacgccaatggaaggttccgataatataagtcttataaaatatatagatttatgataattaagactgagctaacagatgagaatcctagtcattggccaagcagcatttgtacctaatacaagtctctgtgcactaatttgggtcgtaactcagtgggcagaactcaggtgtctggcggagaccgcccacgtggcagtagggctcgagcggcttttggcagaaagatttatcttaacaactttaggacagagaaaccagtgtaaaattcgatatctccctacagtcactcagcagcttcagagccagaacctacttttctgttggtgcctctatgtagctattatcattactgttatcattaagtgttgacttacttaacctcagaatatacttgtcttagttagggtttctattgctgtgcagagacactatgaccacagcaactcttataaaggaaaacatttaattggggctggcttacagagcagaggtttagtccattgtcaccatggcaggaagcatggtaacatgcagacagacatagtgctggaaaggtagctgagagttctacatttagatcgtcaggcagaaggaagagaggatgtgacattgggcctggcttgagcatctgaacctttaaagcccacttcagtgacatacctactccaacaaggccatacctccttgtagtaccattccctgtgagtctatgggggccatttttgttcaagccaccacaacacggaagctcagaatgtggggctgggaagctttatgggtcctatggcagcaccccctactcaggatatggttttcttcctgatgggttgttatctagcctctgtttagacaccagctcctgaggtagctcaccgtagttccccatggcttttggatggagatcccatatccattccctgtgattgctgttcctttctcagctctttggagccactgaccacccatgaggcatcagccactataccatatgcaagataaacaaaacaagtcaaatgtggtttctgccttctgggagtaggcatagtaggtaaaacagacaagtcagccattgtagactaaggagccaagtgctgtagggcctaaagcaaactgtcaggtgaagagcagcctcctgacagatgtgacctctgagctgaacgggggaactatgagatgagcagatgaaagcaaagggcatttcacacaaaggaaagaagccaatgggaagggagagcatcacctgtcagagggctcttcagaaagcacttgctgttttatgggcctggagtagggagctcgtggccggcgatgggagggaggcagcagaagcacacagcggcagattgtaagggctttagttgatcagcagtctggttcatgcttgatggtactggcagaatattaatttggaggcttcagccttcttaagatgccttcaaattaaacttgtcctgctttggaatgtaagtatcagacagctttaacttccagttctgatgcctttgtgaagccgatttgaacctaagagcacttgtctggggaaaggatgctcctaactcctcctgacttctgaggtgatgagggagctgacccagtgtctagctctgcttcccccacataccataaaaaatccctccctcagctattgtgacctctaatgttagctctgacattagactgagagggccttgcaagggcccctcacttttaatgtgactgtacaattctgcagtgaaattaagtccaaggtcaaactttccctgagcactccctaaggcttgagaggggataatggaagttatggcttttctagatgttcaaggatgtctatcagacaatggagacagacagatgatagagttgctggaaaagagggaaagtagacaggaaagtcaggagagctggacttgattgacatgtctggaggagacagtgataccatgaccaggtagcttttgtttgaagaagggtttgagcctcctcaagtatagaagcaatatatccatggtggagaacatgcgtttgccaaagcaggtgtaagaagttcagcaatgaaagattcagggtgcaaaaggaggttatttatgatgacacagtgactcaaattagaaagaaggaagcatgctcaagagaaggtgaggctggagactgaagatggctactctcattccctctgggcctgttaacggagagaggaaagggacatgtgggaggtgagaggtaggagtcgtgagttcaggggattggtggaaaagggaaagtcaggtgagggttagaaagaatggcagtctcagggaagaaagttgttgtgcatctcagtggttcatagagcttaaaagtaggcagacagaattagctccgtaaaaataaccctctgcctgcttagatctgtgtagacgctggtacaacatggttcctgtttggtttccttatctgtctccatggagataaacatgcctgtctatcttggggtctttggtgattttgtgggtgtttcagatggttcctgagcagctgatcatgaacaggctttaaggaggaggtagccacaataaggcatgctcttcttctaatcaattatcattttcctgtttaaagtgtgaagatggcatactatatgatataccagaagcattagtatgagagagcttttaaaatgccacgatatatcctccttataagaaatatcagggtgtttttcagggttttgtttttggtcttgaatttaacatttaccaaaaaaaaaaaaattactttgggcatgcctttcctgaagtgctttgtagaacacatttgacaaaggttccctcagcacctgagctatagcaacatgcaccatcatttatgaatcctagaaacatgtgtttattaaaagtgttgtaaataatagatatggtagggcttaacttacaagaagcacttcatgttaaacacataatattcatataagaatatgtcccatggaataagattgttataaaaataaagagattataaaactcaacaataagaatagtgattacttccggaatgtggaaagggaatgggattggatgaagcacaaaggaaatagttactgttgtgtcaatacttgtggagaggagactattctctttcagtgtgtggtagataaatgcaaccttggtataatttaagtatcacaatgtatactatatcacagtatgctcatagggaatatatatcataaatatatacttatttttttctatgaaagaatttcttcaagggaaataaggatcacaaccttgggaaacttggaattttgaatatgaaaaaacatttgcacagataaaagcctcaaagtgcttataagacagagagtcatatcttagccacttagtgttcagtgatagagattggctttttcgtaattagcttcacttcaaaggggagaatcgggaagagctgtagtcagtgtgtgaatgtcccattgggaaggtgcatagaaacacttagtggaacatagggacatttctcttaagagatgacatttagacttgatcatgaaggatgagtaaaataataagatagttggtaaaatacatatttggggcctgaagagatagcttcaggttgccctagtagaataccccagttcggttcccagcacccacaactgttgtaactccaaaggctccaacacccacgtctggcctccatgggcaacagttgtcctttggtgcacagatatacatgcaggaaaacacccattcacgtaaaataaatgtgaacaaagatgtaacacctcgtgaagatgggccatgatggaaggcggacaaagaagtcagctcacaggaagatggagtgagtgttgggtttggtggaaagctgggctggcagcagcttctgggggggacttcctcatcatgccaaggtactttgtcctggtgctgcagcactgggcagatctcatatttctctttgaaaaattcaatctattcttaagaaatatttatctgtctgcagtttaaagactaggttgggatgaatggagctagagagatgtacaactgcaagccagagatgatgacaagtaacagcaacagagatagtgctgtgagagtgacagggccagtggagattggcggcagagtctgaggcgacttcctctcaccatttcttacttttctgtggctattcctcaccttctctgctatcttctcttggactgggtccttgatccatctaggtctcatggatttacaatggcaattagctagtattggtaaatgtccacttgggaaagatgagaagcatttgactaaacacacacaccaccaccaccaccaccaccaacaccacccaggagatggagggtacacacaccatacacatttcagtaggaatgattagaaacgttgcagagttctgctgtgtctttgtacagttggccaagcaggccttagtaaccctcactgttgacctcctaggcttttcttgggaggttaacacttgggtgaagaatggaaatggcttcttgcaaagcataatcggaaaggttggtctgggccttgtgttgttgctactttccttggttggctagttttcctaagaggggctagagttttcctagcctgccatggtggcgcacacctttaatcccagcacttgagaggcagaggcaggcagatctatgagtttcaggccagcctggtctacacagggagctccaggacagctacacagagaaaccttgtcttgaaaagaacaaaataaataaataaattttaaagtaccaacccctacccccccatgttcagaattaaatgctggaaaaataaaaaactttttgttaattgaaaggattggagtagttggactgtatcactatgcagccaaatttcccaacatggagaattttaaatatggaagaaaccaaacagttctttctcctgatatactggtggtcatttgcataaccaaagaactccaaacttctcttgaattactctttgtgagaaatagcagcactttgcccaaaggtgcttgtttgttcattcattttaccattttctgggatatttgggggtttcacaattgcatgtttgccaagttcctttatcttagaatctaagacttcgatgcctagagcctcccactcatcctctggttgctacaaacgacatctgacaattgctttctgcatggcatcagtaacttcctacaaatggggatggttagtccccatcgggatacagccgtgcggcctgtggttgtgcaccacctggtccctaaggatgggtaggtgcatggcttccgctgggattgctcattaacacttgggatcatttgggaggtttaggttcatccttttaggaagagttttgacagttttctgcagcaatgcagacctctgctatatttgccttctgcttagataaaagccccataaaatctgcccggagcctgtggtgccagggttccatttgctcagaacttgagggatgctggcaccaggggatgggctttcattggtcattaacaagggattcgggcagcctccttcatgatcctctcaagttagtttgattagaacaatagtgataatgggagctgtcagtcactgctctcagtgtttgctcattggcaggctctgcattcctttgctgacagccagcttttctgttgtcctgttaggatgacagtgagctgcactatcatcatctgacagccctgtccctcattgcatttgttacatggtttcctattcttgtccatcttttctctttgtagcaatacggatgtgggtggacagggattttcttggcttctggttttcataacttttccactttcaaccggtttgttcccttgatcctcttctgtctgtgccgttcctccttcactctttgctcacgtccctcacgtccctcacgtccccattggtcctcacattttcccttttaagacttaccttttactgataatgctctgctttgtttttcccttcaaatgggctttccagtgatttccccctcgggccctattaaaattcaagttatacaaatgtgatcttatttcagttttattttttgtgaaccaacatttccttcccatcattggcacctttttctcagaagcagtattgattttcatttggaccttgcgatgctcgttgtctttttcgaagttagcagcctcacatctgtaaattctcttaggtttactataattgccaaccctaattatttctgtatgttctgttttggctagatgtgggaggaaaatcaggagagggcgtgtgtaaaataaagctggaagggaagaggggacccttcaaactgctttgcttaaaaataactaagtgaatttagctccagacaaggaaaatttagctcttttctcagtgacactgagcagtcggtttttgtagaagttcagacctctcggtggagacaacatcaagagtgattaaggaggagagaacaaaggaaaagtggggttgggtctctaatggtcagaccacaggcagcacatccgggcttagtggctaggaactgtaaatacttgtttcgtttcttacatgcccatgtcaggggaaagtgagcattggctgcaaaatccctcaggtctttatacaaccaacaagtacaccaggcccctgatcaccaagggctggctggcgttttaattacctctagatcagaataaaacagatatattgttgttgtgcagtttttactctctttgctctttggggggcccaccatccacctcccaaataaatcatacatagaggcttattcttagtaatgaatgcccaaccttagcttggcttgtttctatcccttctaccttttctctgggctcttatctttcttacttctgcatatctttctttcttactccataggtggctgtgtagggctgggtggctaggtggctgggtggctaacccctgatgtcctctccttgttcttgggatgctcctctttcctcatttttccttctatttatcctctctgcctgccagccccgcccatccttgctcctgcctcactattggctgtccagctctttattaggatcaccaggtatttcagacaggcgcaataacacagcttcacagagttaaacaaatgcagcctaaacaaaagtcacacaccttaaaataatattctaccacacagttgtgactttatttactacagagtgtctccttttctataatgctttttgtgaataccttttattgttgttgcctttttgaaaggctgggacctcaactcatgctaggcaagtgtttgcctgttcagcccatgagcaccacccaggttccaggaaatgtctttatatgtccttcttcagttctcttacatgttctgtgatcctgatggccagcactctccataacaaacagccacctcatttcagaaagtctttacctagagcttccatttgtcaggctaatgatgaatgactgtgaaatctatcctcagcttctgcccactctaccctcccaaatgccttcacttgattatctagagagggcttcgtaatgggtagaaaagcaatgggaacttgggttttaaaataactcggttaaactcagttccaagggaaatggacaccacttaactcaatatgggaggaggatgctgggagctcatgttcgttaagttaccccagagtgcagcctcatttggcaggttccattggctcagcacaagccctgtaactttacacccaggacacagtttgggttttgagttccatgatgactaggcactagtttttgttttttagtaaaaagccaagctcctgtgtggagctgaatgcccctgagtggtattaaaagtccagggagaaggccagaactgcctagccttttagggggtgagattcggggaaacagagagatggttagaaactcagcctcaagtggctgacagggacagaaatgtctgtatagattgcaacttgctttcttccagaagcctcagggtctcgataataatactgtaacacaagatttggggtgttggaatctgttttcaaactggtggcctgacagagttctgttgttaatgagttttcttagtataatgctccttcctagctaagggtgtcttataattgatggactattgtgccagtagctgccatttactatgcttcctgtgtgtcaggactcattccaaggcccccttttatcttctcaattaatcctcataatacctctggtttgccgttctctgctcaactccggccttttatttctgggcctttcctattcaaaatgaattggccagtggtttataaacgtgggcacgtgagcaatttaccacacttctccccatgtaaaaagcctcatttccccatgattttaaatgtgatgtgggacaagagaacgcagcagggtttgtaggaggggagctgggagggggtgggctgggaggagggctcctttttccttctctgtctctcacgggtccctgtgataatgtccgcccgacaccaagatgctcacaaaacaaagtgtcagctttccttttctctttccccctttagctacttgttctttttgcagctgattaatcttccctgccctctccagaagagaagatccttctctctgtggcactaatttagggatggtggcctacttgagttaggcggcaagagagccgagcattcaaaagctatccattttacttcccgcctcccagccggcattcacaatccccagcaacccggaatgtggatgatcagaggctgaggacctcccagggtcactggagagcagtggactctggtgtttctaaattgatccgacagatgagaatgtcagcagacattattgcaatttgtattatgacagagtcactcacaaagaaataaggctgatagtaggaaaatcatcttcggccaaggaaggctaaaatttgtcaaaatcggagaaaagtgtaacatgtttttcatgggcctacttggagaatgaaataatgcaaaatggtgaaagggctcattttctctccttcctcacatcatagtccttcaataactgaataagcaaatctctgttgcaaatggcccccagcccccagccccagccccagtccccagccccctggccccctgtccgagaccttaacttgcctgggcatctccctaggagttctgcagaaatgagtttctcagccagtgcatgacaacacatgagcagcgccttaggaaagtgtgagtccttcgccttgtgtttctggagatcctggctggcacctccctgtggtcaggagaaatctgaatgtgacacgtttcacagtgctagtgacagagaaatgacagatattcctctctccaacagtgtggttcagttttaggggacccttttgctccagtgaacggtaggtcaatggcatggattttaggtcagcaagtcacaggggagcacaatgacaacaagtaggtgcctgatgtccccaaggctgtccctgcttctcctcttcagatcactgtcctgtgctcagcccaccttatgaaaaatggttatcatgaccatacccttgccactttcattgacatggggacacagtgcagagacttatgtgtcttttttaaccaggggacatatggggcatctcacttacttgctggggcagaaccttgtgtccctggtccttctgctatttattgtcatttctggtgttttcccaggccatgaccttgaagactggaaagtcagtgttgtctgtctaggtactggatttatggtggtactcattgcaacccacaaggagcaagaggtctccattgtgcttatgactccagcttctgggcctctcccttggtgtccctcctcaagtgagctttctctaacctgccccaaccactccaatgacctggacctagtctgctggccacaagtgcagttgacacggacttttttcttatacctttgggtagctctgaatcgtgcctatgcaggttgctgaatgcgtgtttattgtaggaagagagatgcaatggagagggaggggggcaataagaacttgtttgttcactgaggcttgaacccagggcctcatgcattctaagcaagccttttaccattgggcaacagacaccccagttcctttctgttatttttaatttttgtccatgggcctcaaacttgctttgtagcctaaactgccttcaaaatcactatcctcctgtttcagcctccaaaacttgggcagcctgcctgaagctattaaaggcaacagccatggagagtaaatgtgctcagtgcacatgcactcacagaacactttatgaactctctgttgagggtgtcaaatgctcgggtaggtgtgtgatcaagtgcctcataagccaagagactgcccctcttccagcggggcagatctgaggccctctcccaagaagggtcttggttggcacccaaaagatcagtggtagttcggggatgaagaagggagagggctgccttatttaaagggccctgccatctctgcagggaccagaagacataaagagagaaaacccagggacagcgtgagaaagcagtctgcttgagcaaagagactggaaggatgggtggggaccgcttgcgtacagccatggcctggtgtgtgtgtgtgtgtgtttcagaggtcccctggatttgtgtctttttaatccatgctttgatgattctttctcactcttcctggccaagaatgttggcctccgagagcatggctggaggaagataggagggcagtcataagcaacttctagggaaagaggtgtggtgcgggagagtgtatagctgtgatttgcttgtctcttattttcttctgataataatagaacatactttgagagaccatgagggtaactgacctcagagcttcatttcttgcagcctctgcaccgcatggtctagggaccctctgtggcctgaatcacagcttttcctccctggctcttgcaaatgcagtatcagggcagtgtccagacacagaaggcgttgtccactgatgtgtctcccatttgccacatgtggtagtttgaacgtaattgcctccactagctcatagagagtggcactattaggaggtgtggcttcattcgagtaggtgtggtcttgttggaggaagtgcatcactgtggaggtctcatatgctcaagccatgcccagtgttgcagaccccttcctgctacctcaaggatcaagatgtatgtcttcttttccactctcagctccttctctagcaccaagtctgcctgtatgccaccatgtctgaccatgacgataatggactaaacctctgaactataagccagtcccaattaaacgttttcctttacaagagttgctatggtctggctggagagatggctcagtggtgaagagcactgacttctcttccagaggtcctgagttcgatttccagcaaccacatggtggctcacaaccatccgttatgagatctggtgccctcttctggtgtgaagatatacatggaagcagaatgttgtatacataataaataaataaatcttaaaaaaaaaaaaagagttgctgtggtcatggtatctcttcacagcaatagataccctaactaagtcattaccacagcctgaaacattctcgaatacaagttcacaaaacaccttcctgtggaagcacacttgacttggagtcatgcacactttgtaactgtgatgtgaactctgtatgtttctggatgtcacaccctaacatgtcagacatgaccagcacaagaaacccttgctgtcagaagttccctaggatgtttttaccttcctccctcattctgacagtaacctcagcacacaccagattttagcttatgtttggggaactgtattaagcagctagttagtgttcagtcttaactttctcatggaacattttcctgtattttctccattagtttgatggaaaaacactgctggtttgagccacactctgctatgttcaattcagtctcattccagtgatgtaaaccatccagcacacttcatttaggaattcagaactagaactaagacagattacagtgaagaacacagaccctgcctggggtggatctctatgcctgttacatgaaaagaaaatgtgaaactagattatcatggaagggaactttttttgaaattgacactaaacaagaatttttaagtaggctctagggggaggaagccgattttttttgtgattgacttttggatgggggggtgcatctcagtgaaacttgtaccacaagactgcacggcagagctatagaaacttgcgacaatatcttgcagtaagttatttaagagtatcatagcagctgtgagcctgggagtgtggaagggagattacatgatggaaacagcatcgcagagcttccagctcttacatctgtttgacggacatctctagtgagtgctttcccatcagatgactttaatggggtgagatgctgtgtaatagcatccaagaaagaatcaggctggaggatatcactcctgttttgttttctgtcatcgaagatggtggtttgatttggtgaggaattttgtggtggtgaattgagaattctcattgccctcaggaaataagaatgtgggtagctctcacaaagccagtagtatccaaggggggctttatgtgcttatgctcagcactgtggccttgggagggatggaaagtacaaagccatcttatggcttcggcctcctcatttaggatgttggccttgatgttgacttgagccttggtcaagcattattgactctgtgtccttcatgcaatgaatgcttagctgtagtcagaacttgaagtgtgacaggcacttgcagttggccactcagtggagtatacacctgtcagcatatattgctatatggatgagataatgaaattatctcacgattgttttattttatattctacttgactttcattatcctggtaatttcaaagatatttaataaaattcataatgtaagaattttttatttactaaatgacatacagatagtttgaattgctttaaattaattttatacaaaaaactcacataactaacagatttttgttgtattagtccttaggtagcgtcttacattcttacagtttttcccttaaggaactagctaggctagggcatggagaagatacctataaccctacaacttaggcggctgaggaagggggatcacaagtttgaggccagcctgggctatatattgaggccatcacttaaaaaaataaaaaggaaaccagtgaggttatattttataactttcatgttccttttgtaaatcacgagataccagagaggttttagtggttaaatacaagcacattcccatgaacacaccagagtgttgatatcttcgtttcattggttaacaatagaattatgtgggccagagatatgactcagtggttaaagtttattacagctgagcctaacagcccgagttcagtcccagagatccacatggtagaaggagagagccaactcctgacaacagacacatgtatgccatggaatgcttgtacatacatacatacatacacacatatacacatatacgtacactatatatgtaaagagtcttttaaaaattctttctaacatttttaatgtcttcagatgctttggaagaatttcagtcagattaaagatatcataaaaacatcctgagacaaatttataaaattgtcatttttttttcatgtcacttgtcttccagcatccttgctttctgtgttgaaacctttaaatgtttaattggcaagtaataattacatgtgtttatgaaatacagtgtggtcctttttgatacaaatattcattatagaatgttaaaataaaactaattagacatgcccactgacactccatgaaagctgccctgtaccttcctaatgaaggggcaatggttgttttagttattacttcttcaacattggcattgaaaaggttgccataaatatccttcttttggaaacattctagaagcaggttaactctggtttttgtgagccctcatttgagaaatgccccccccccccagcagacctttccaggcatcccagttaaacactattgtcattcccactggagactgcaaacccttggggcctattgtttttcaaaactttatctgtatttaataaaatgtcatacaaagctgagagagaaaaatataccctgaccaacatacttactgtgctttcaaagttagagaaatactagttgtaggagaggggtgtgggtgggatggttattttgcatggaaacttctgcattttgcttttataatctgccaattcttcttagctccattttttttcactcagagaacttaatgaaactaagtgcggtaagctcttttgaaagttcgcctttagtgccactaattagccgtctgtgttgaagtcctgtgtgccaaaccttctacttgggcactagagatactataaagcaatgcagatgctctttgaggaatcactccatgtttatgttgagagactgagtttccacctattaaatgttttaaatttcattgtgttatttgaagagtggaactgttattgtttgaagtaggctgtgtagcccttagtaattagagaatgtgtgctgggaagtgactggtccttggtcatggtgcagaattactctgctccagtccaactgtaaattgtcttatcgatgctcagctctgctggtccaaggtgatggcagtgatgagtctccttcctgccacaaactctacaccccgtttgctgtcacagttgaaaatatatacttctaaaaacttgaggactgatggtggaatttgaacacataatatctaaatcaatgtctctggtgtccaggttgtgttctggcatccaatgatgtctatgtctgggtctatcctatgtctatcctgtgtctatcacctcagaacatgaattcgaggtcataaacccagaacctgcaccacatgacacaaaaacttgtttgtattttcaaatttaactttggtggtttttataaaatattgggtttttataagatacagttcagtgaccagttgtgccctgttaggtctttggcatttaacaaagggtgctgtgttacagatgttcatttatcttaaaggaaaaaaaccaaattgaagcataatttcataattgatgataataaaatatattgtttcatgaaaaggaactctttagcttagtgtctctcgtttctattggaataatgaaataatcccatcgatacgagtttctaaatgtgcctcttgcatgaaatagtcattcattaatattttaccatgtaaattttagagaaaactgtttatgcatagctaatgcttttaaaatgtgtaaaatttattcttggacatgattttcattccttaatagaaagagcagttactttcaaattatgggctgagttacacgtgtgtggtgatatattgtttatgatctaataaagccactggagatcagttcacaaagccagccacactagttagctatagaaactaggcagtggtggtacacacctttaatcccaggacccaggggacaggcagatagatctctttgagttcaaggacaccgtggcctacccaagattgatgagtaacagagcacttgggatcacacgcctttaatcccagcactagggaggtggagacaggaggatatggcagggcagaggaaggaataaaaggagacaggaattcagagcttttgcctctgaggattcatgggaacaggatggccatttcagctgggtagaggtaaaagctactggcttggctgctttgcttgtctgatcttcagcttgaaccccagtatcagtctctgggtcttttatttattgtgctacacacatgcgcagatatgttatccacctgttctttcagtagaaagtagacctgagagctgcatctagccatggtatctattgtggccaattttcttcttaattaatatggtactgaatgggctcagcattctatcatcattgtcatcaccatcatcatcattttgtgtgtgtatgtgtatgatgtatgtgggtaggtgctggcacatgtgtattctgtgtgtatgtatatgatgtgtgtgggtgcatcctggcacatgtgtactctgtgtgtatgtgtatgtgtgtgggttcctgcttgcacttgtgctctctgtgtgtttgtgtatgatgtgtgtgggtgcatgctggcacatgtgcactctgtatgtgtatgatgtgtgtgggtgcatgctggcacatgtgctctctgtatgtttgtgtatgatgtgtgtgggtacatgctggcacatgtgcactctgtgtgtttgtgtatgatgtgtgtgggtgcatgctggcacatgtgctctctgtgtgtttgtgtatgatgtgtgtgggtacatgctggcacatgtgcactctgtatgtttgtgtatgatgtgtgtgggtgcatgctggcacatgtgctctctgtatgtttgtgtatgatgtgtgtgggtgcatgctggcacatgtgctctctgtatgtttgtgtatgatgtgtgtgggtgcatgctggcacatgtgctctctgtatgtttgtgtatgatgtgtgtgggtgcatgctggcacatgtgcactctgtatgtttgtgtatgatgtatgtgggtacatgctggcacatgtgctctctatatgtttgtgtatgatgtgtgtgggtgcatgctggcacatgtgcactctgtgtgtatatatgatgtgtgtgggtgcatgctggcacatgtgctctctgtaggttatagaatgacttaggagaaccgagagggcagcgctggaatctggtagacgcttagagtgaactcagtgggggtggtgagcaccaagcccaggtccagaagactctgaggacgctggttgttggctgcagagtcaagttgcagcgtcagacttgagctcagggactaggtggcgtgaagggcagatctgggtccaagctgctgggatggtcagcagctccaggcggggcacaggtggacaggttatggcaatttgagtaggccatgtcaacagtaggaactggagctaactgaagcctctgggacagtgagtcaggagttccctgcctgtccattcctgaaacatgcacttgatggccaggttacatgttgggaccatagccatcacagtgctaggtgcccaactctttatgtgattcaagcgactttcctatactcccaattgaccccaatgaatttacagagtaacacctcacatactctcaggaattcaccagtacatgtcatgtgtccacctaagtacagaatcattctccatccccaagatggactcaaaagctgcttgtaaaatggagtctctcagggcaagtcaccatctgaaaaacccactgttttaagcaatatgagcaacttagggcagggtaccagtgggctctgtagggcagggtaccagggcagtggttcagtgtggtaaatgctgctaaaggcctgagagctatcacctgactccagaggaaacatgttcctgagaaaaacaccaagatagtgttttgttcttgtttttttgtttgtttttgaattatttttcttattttgagactcatccttagagagtccatcagaacacaaatacttcggaagaacctttactttgcttcaaaattcagaaaaaaaatatttatttcattctaatgttagcaaatttaatttgtttggtctgactttctgttgttggactgcttcccctgcttgctgctctgaatatactataagatacgttttaaactttgagatctgtaattgcatctgctcaaattcgtaagcatttaagaatgtttaaaatttcagtaagtaatggcagactctatacccttgtatttttatcatccgttgtgtatgtgggcatacacaggcagcacacccttgcagcttaatacaaagcagacgcctgtaaagcaatttgaccagaatttgtttaaagtgtgtctgtgcaccagtttacttcctgatttgaagctgtggttttatcagacttttagtgggggtggggtgggggtggagagccagagagtgacacattgcttagctttcatgtaagggctgtttgcagcagtgaagacgcctcggaggatggagtaccttttcacactccttgttgctgcctataaatctgacagagaagtttgctgtctcagcctttctgtacagaaactaacagtcggcattcgtttgtagtcaccatctagctcaaccacggttgtgtccccatctttttgatgggctttctatatttcatacaaaatttatacgtctgtccctacctgctccccaatctccatttgttcattcctaatctgggcttgggggtagccttgggccatctgaaactcaccatagcaaaacgaagtcatcccccaccacttagggccaaagttgttccttttgcgttctccctcctcttaataaatggcagccatgagcagccacttattgtccagaccccaagtttatctgtcactccgttccccatcagcagtgctccagtgaagcaggtgccagcggtgccggcccctcccacttcagttaccagtgtctgaggcgttgtctgggttatggcagtgaccactgacccatgtactacacatgcatgcttacctttaaacagcccgttctgtgcatagctgtcagagcgatcctttgccaacagaaaacagacccatttactcccaggcttggagtctcacctaaaataaaattcagcatagctttcttgggctacatcagtattcttgctgtgagtgcccaaacgctctcaccacaaagcctctgcactttctgtttgtttgttgagtgacatacacctttgtgtatggagaatacagactggggaaagaaagccacatcaagattaacgtgtaaaggaagccaccagttggcaaagaaagactggaagcacttcctcacctgggcttcctgtaaggaacagagcacgtttgaaaaaaatcctgctgtataaatgtggttgtctaaatatactgtgcagggtcatttgccccacacctcacagccttgggctttcctctcagctcaccagctctctcctgtactcaggagggcatcccctttcttcacagactgtttctacttttccttctaagcttgagtccctggagcagtcctttgttccggaacacacgagcctgaatcggtgccctctgaactcgataggcagctgcaacactttcatggccaatgaagcccaggctcattcccatggtcccttccactccctgttcgcacgtcaccttcctctagttcgtcacctctttttctcatgtccatgtcacaaaaacacagctctcacctcaaagggaatatgagatattttattctggagtcaaatatgagcagccatggcctggaaacacagattttaagttaccccgaattccatgtcccaatgttgaagctgtttcatgcaggtttggtagtaacagaacaaagtaataaatcaagaaattttaaaaacatgttggtggaaacactgggctacagccatggtggagaaatctcagtcataagcctcagatgctgccatctggtagcatacttagccctttgattggtggggaatagggctttgctaggttaatccagtccagaggttttatctgtttattggcatgttaggtctgacaccaccggaggccagcaatgcctcttcaggaggccagaggacctaagagaaattgtaattagactggaccacgtctctgaagttctaagaagtcagccaatctccatttgcaaattcgctccaggaattcttcacatcattcactccttagcaagcccccacttctctatcttggcgatttcttcttttcctgtagagcttaagttctgtgagagcaggaccttgatttcccccccacttctctttctaatgtctcatgtcagggtctagactagtgactcaagcccagtgctccgtgcgcagtcttcgtggcctctgacacattccatcacctcctgcgcaaacaaggttttaaagttccttatgtatactgtgtttttctttctttctttccttatcttcccaaaggccacaggtacacgccacaggcccggcaaggggctctggctgtccagcctgtgctgtggccccatggcgcagcttcctgtcctccttgtggtctgtaggcagcttggatcacaaactccctcaggacgcactgggctctgcaggaataaaaacaaacacgctgctgtattccttagataaaggggcctttggaccaggcaggcagtctgaaaaacatcagtgcctcaggaacctatgttttaatgagtagcttatttgtattttgaattttgaacatttcatggagttgtatggggtgggcaggggaggttagaccactactgttataattcccacactccttgacgctgtgtttccccagtgttggagagtttgtatccgagaagtcattttaaagttacacagcttggagaagacccttccaagcagtccctaaaaatcgcaagcccttgtgagtgacgtgaggttcctcaagcggatgtctaacagcagcccctcttatttccacaggtgatctgcaactcgttcaccatctgcaatgcggagatgcaggaggttggcgttggcctgtaccccaggtatggcagacatcccaaaccaacgaactcccatccagctctccagccttttggaggtcattagaaaggcttttgtagcagctagctcaaagccaagctcaaaacttagtagtaaaataccggaggctgtaaaaatgttaaagtcttataacccacagtatacatgctatggtactaagatgaggtagagttcatacttaaccacttgttctcaggcagactttggggtaggctgaagctggaattcagttctccttacaaatctcccctgagctttgtccttagcgccctgtgttgaagcacacagttagcccaccagacttgtggctcaggagccttcaggagtagctagcactctggcagcctctgtccctgagctgctagatggcatgtatcccagtactagagccaacctgactttcattctatcttcatgcttctaaggttcaaatatagtgtttcttcttagcaattgtgtctgagactcagcctcttatacccacactggttgcaggtcaggtctgttcatagcacagggtaccaaagcagccacatagaggacttcagagcgagggctctgagctcaggccacctggttccagttcagtcaccagttaaattgcacattcttggataagccatttcattcttaggcagtggtctcgtcacctgtaaataatcctcacaaggttgttgtggtggctgaatttggtcactctgctccagtactgagcaagtacttcctacatggtacaagttcatcctaattgctgtcagtccaggctgacctcgtaaagtcattcatctcccacatgaaacctttaggaaaataaattgactgggctccttcccagaatgcatcaggacctactgagagcacgtctatctgattatttttcagtgtgagcatctagcagagacatatccctctcctcccagagctcagcggtgagaccctctgtgggtcaatggcatgttgggtgactgttgtgattgttgctagctggaagatgatatctttataggctactttgtcagtaccaccttcatctgggttacgttatcgggcaatatataatgtgacccatcccctcaaaggactaaaaactgattttattatcaaacttccctaattagcctggattatgagaagcatttgacttcacatgaagcaggatgtggggcatgcctatgagcggtcccagagcccagtccccattttctctccatcaaacctatcgtggacccccccccccgacctaaagtgtcttttgactgttgtttacatctaatgtagctactcaactctgagcattgattttttgtttttgttttttgtttcctttagcatgtctctgctgaatcacagctgtgaccccaactgctcaattgtgttcaatgggcctcacctcttactacgtgcagtgcgggaaatcgaggcaggagaggaggtaaggaaacccacgcctcccactgcctgcccttcctgctcatcagggcccttctcagtgtggcaccctcctacaaccagctacaactagctccccgctgtcctgccaccaagatgacacttgaaatagtcacaaaccaaactgtagctggatcatgcatagtatctggtcttggttgctgggtttctgcatgtatttgaggggtgttcttcagtgatagagcctgtatgttttatgcatgtgcatgggagtcagctgtctgttgcatcccagcacacagccatccttccatgggtagagaggcgacccagcttgtgtatagcatgcccagggcttacccacgaagccctgaagcacattttgaagatattctaaattctgtatgaagaaagtagacatggtttattcttccaggtctttgctactgggcttctgtaactccctcagcatttctggttgtttgcttcagcaaagacagagggtcaagcaggacttggcagtgtggcgttgtgtagatggccaagtctgcttcttagatgacaaacctctacagaagcctgcgatctctcaagtgactacaaataggcttctgggccacacagtctgtgtggagtttgtggggctgctacttatgctgagctctggttacagtcatgtttcccagaactccatttcctctcctcctgccttccaatttgctaaagtggatatttactgcatggaaaatggagggctgtaagcttttatggcatttatgcagcactcctccaaataaagccctaacatagaggtaccatattttatagagatttggccttgacaagactccctccaaacttattttcaaccaagcacacagcaccttttgctgaatttccagcctacaggaccaatgtgcactgggatatctgctgatgctatggggaatttagatttatttctctggggtcatgtgacttcaaggtggggtagaaagggaacctcttctgtgttcagtactattagtatgcttgtcacttttgtactgctttgacttgatgtaagcaacttagaaagacgaacaatttatttaattccatgttttggagggttcagtccatggccaggtggccccatgtttctgagtctatatggagacggtccattgtggccgcaggaacatgtaatggaggctgtttatctcatgaccgtgaagatgagtgagatggttcacattatggtagacagagtagagctgtaaccaagagaccagagccctgtagttcctggtgacccccatccccagccaggccccgccttcctagggtgtgcctctttccaatagtctattcaaatttcaaatacatcaattgattacacgtgtttagtccaaagctctcctggtctgcttgtcactggaaagtccctcatagataagtagcagaggtatgctttcataatttcctagtcgtatctcaatacagtcaggttggcaattaagatgaatcatcgtaagccattaaaaggtacaagtgactgttgatggtgatgatgttctaaccacacaagggctagagtatcgctcggttgtagagcgcctagcacgtacagtgtcccaggttcaattcccatcactggaagaatatctataaatacgaaaaagctaagagaagggattggggttttctaagcttggctaccaaattttcttcttggttggttcttaagtcatttgtttttggtgtttgcttcactttttcatgccccctgtctctgtagctacaagcaagtgcttcttcttgcttagtggaatggtccagttctgtgctaggcaccaaggactgaggtgcctccctctgggatgcttatcaaggactcttctccaccagaagagcatcctcctaggtgtttatgcatcttcttgtcagaagacaaaactccctgcactcccattgtcccttctctgtgaatggcatttcacatgtgtggtgtcttgtctggcaacatttctagaagtctccgtgtcatgtgcccttcaagggggcctttcagaccccctctaatcagggaagcttttccgatttccgagatcgaggaagggctttccctctgactcccctctcagtggttactaatatgcctttgtcacttatcctggctgcaggtgacccttctcccagggcttgcttcacaccagagatactcttgaactgattctattagttgagctgactgacaccagcagcatttctctccagggcactgggtagagcatgcagggagttggggagcccagaagacagtttgaagccaccgctgagaggactaattcctacttattatcagatgtgagctttagtgaagttgataaaaagagcaagtttaaagtttgttggttctgtagcatcaagtttgtattttggctttgttgctcactaggtgccttggttttcatgtggaccaggtgggatatcagtatgagggtataagcccaaggaggaaagactatagagtgactgaaacagaagattcttaattgggggtagtggacgctgttgttgttgattgttttctgcttctgtagtattgaggatcaaactcagggccttgtgtttcctgggaagcactgtctttaagccacagtagctgtgtttatgtttattgaatgaggcttcctaaaggtaaaacaagagggagagaggcactatggcaccatatttatttatttatttatttatttatttattagctgccagacatctttaggtattccacttggctccaggaagaaacaagaaagccattccactattagcctgaggtgggaacattttaacctgcccacaaggagggctgggaaatagtaggaactttgacagtaacagaccttactttggaaataccctaccttgtgtttctctccccataaaaccatcctctgggccacctttgggctcttgccgttcaaaccagagccatttacggccctttgcaatgtaaggatgttggaagtgatggacgttgctgagtctttggttttggttctggcagttgaacaatctcaccctacagagaagcgtttgtgattcggccccacgtgcccctgctcacacgtcataacttgtgtgctggactgctgaaggctaccctcagaagtgctaggctatgaagcacttggtaatctgatagtcttccagcgaatggattagagcagacagtcagacagcctgggtaccattatgtgaagtcctggttaaaagaacttggagctgctgtaactaactcttgggttcagcatcatctgggacctgggcacctgggatggttgtgatttgcgtgaattgaacacatcacgctcccctaacatcactttttgtctgtttggggattaggcagtctggttcttcattcagtaatgtttgtttgctaaagcatgcaacaaattcacagagggcttgctgggtagtaggagctgggtggctgttccagaaactctgaggaatacatgttatcggaatggccttctcacgaggaggaaggagacacagaaggtgataacagaatatgagaattgtggtgtcgtaagcatgcacagggcttcatggacacccagagcagggcactgaggcagatagatgaaagtgccacgcttggggacagttaaggaaggcatctagagaagtggcctctagataaagacacagttaggtgaggcagggaccagtgttctaggtagggagacagaagccagaggcagcatggagagtttggtgagtaaagagtgactcatattaatagactgaagaatttgttgcaaccaggaatggagatgtatagggaccaatgtctgtggctttcttttttttctcctcagaatgctatgcacctgaggatttcctaacagtgtctgctatgtgggaggctactagtaaatatttacagaggggaagacccaggcagtgagccatcatggatgtttaggagaaggacagtatggcaagattttatgtgtagacaaagttaagagaatgagggtcaggctatccctccaggcaagagttgacaatgagagtctgaattcaggaggaggccaggtggtggctcagaatagggggcgtgaagaatacaatatttagaagctaaaataaacagaatttattaattaatagattaatttaagatttagttaatttaaaattagtagaatttgtatgacaccgagaagggacagataggacattgaggtttgactttagaaagaagtgaattttttttgtctttttttttttcagtttggaagcagtattgaaaaaatgtgtaacagtgacaatatattgcagaaatgaagacaagatttggttttattctacactccgttgttgatgggaaagatggtttcagggaaaaagattttctctgccttgtgatttgatcagaggcaccataatcaagttccagaaaacccctgtgatattactctaaatctagaaatgatttatgcatttttccataagagttacccttaaatgggagagcaatggtcagagcattaatatttcaatgcgattttgttctatgccattaacacatcagttgatcaatggccaagttttgtatgtatgtgcccactaaatgagccctacatgtagtgagcaatgactccatttaaacttgtgaatctaggagcccttaataaaggcttttatctttgggtgataaaatgattgagttgctatttcaatctggctgtgtgcttctgtaattcctttctttcttttcttttttttttttttctttgccactgagcagcccctcagctttggtacaggatagtttgcaaacttcagtggcatgaacaaggcacaaatggaataatgagcccctatctggagggagggtggattttcaagccaatcacgaaggatgggggcaaggaaaaggccctgaagtggcagcaggggagagagagaatcacagtggtgtcacacattaaagagacaggctatacactcaagacaggcagcctttgaggcacagaacacgtcgacactaggaagtagacctatactcagtgtagggaaaaaagccttatgtggctctatctgtaggcaatgagaagccatctgaagtcttcatgtagaggaatcatgcgatctctctctctctctctctctctctctctctctctctctctctctctctctccttctaccctctcgctgtcctctctctctctgcagttcagaaggtgaaaaggtagagaagccaatgggagatcctttagaaaaccatggctgaagttgggctcaggcacttgctacccagaaagacttcaagaatctgttattattattattattattattattattatatgctcactgcctggcctgatcactcattttgtactcagacaccatggagtcggtggcttcacagtagcttgtaactacccaagaagttgtgccgtttgcctgacctgtgggctagtgaaatcacagtctttggcctggagtgagaaacagggttctagaatgaattctggaggaagcatagtcaccagctcgtttaccccctcacctgtgtaaggagccaggaacagagagcctgaggatacaggatgagtgtgtgctcccaataagatattccaggatacatgcttagagactggctgcctgaactgtggagcatggtggtctctgggaatcttgggggcttgcctggtaccgtagccctttcacctctgaggtggctctgtcttcagatcaaaatgcaagaggaagatggaggaaaagaaaaagtgaccatagccctggcttgaaggagcccggttgccaccactgctctgcacggcagtgggtgctggagggactccttctggttgaggctccacccccaccccagaagggcaccgctgtccctggggggagcatcgggcttgagtcaggtcaaatgcaaacctcagcccttctctggtcttcagttttgcacgctctagcaggaatgctacactcccagaagacattcagcaagaacaggtctgtacccttgggtgggcactccttcttgtgtggaaggcagcacaccacagctttctaacatacaaagaccctagagcgaggcagtgaggcagctcaggccctgtcttctgtcaccctggttacagcatggggctgacagatgtggctggccaggcttcctcctcctcatggagttttaaggaggccaccttggagtcattttctatcagaggccttctgtgccctaccttgacttcaaacaagtaaaatcatgttggaagacatgtgatactttgttttcagtagaagaaaaaccacatggagtgtttgctccagggaggtttgtcagctcttccagcagataatcctgcctcctctcctttagtatcccattcttcccccaccacccagacccccataattaccctctgcgtttgaaagcagataaataagtcatttatgcattacagtaaagctgctgtacattacaagaataaaacaaacccagacaaagggcacaggggcggagcactgggtgtggtgggaaccaagttgttattttaaataggcaacgggttaggctccttgagaaaatggggtttgattgatccccaagaggacaagggaggccaccttggtggatctgggagaactcaggcctgaagtgggaatatgaagggaccacaaaaacggccagaccagctagggtagcaagaggcaagggagacggggaggggaacatccagagagggtccatgtattcagggggccgtggggacagccagtatggagctattgcttctctgtgggccatcatagactaatattcttacaaaattagaaaaacgaaaatttaaagacagtcaaacagcaacaacccaaaccccaatgttttatcattagaaacacacacacacacacacacacacacacacacacacacacacacacacacacacacacacaccaatgtagtaaaaaagcttctaaatgaggactttgtgtttctttcctcattgcagcatagactagagagcccgcagggttcagggttgcactgtgaggccttggccctcctcagacaatagggggcactgttgcagtatttcaaacaaaagaaagcctgtctgacttctgtgcaagctagatggtagaatgcaaggagagaagtggggaaccaccttgagatggactggtccaggtctggatgtaacattgggaatgattaaaagtggtaggttctggatgtatttttatgtagatctaacataatttcccggtggttttggatggtagagtcaagggagacactaagggttcagtctggaaaacatgaaataggagctactgcctgccctttcccaactagggaggctgtgcaggagcatgtgtgtgtgtgtgtgtgtgtgtgtgtgtgtgtgtgtgtgtgtgtgtgtgtgtgtgtagagttccgttctgatgttgtgaatttgatttctatgggttggggagtcagtctagtagaaatgtcagttcacttttttaaaaagaaaaactaagcaacaagtgacagagtatctcctcattttcaaaatcatcaaatatagatggtcctaaatcccaggaaacagctgtacagtcagccagtatttaaagccagtctggccgcatcatctgctgctcatttgtttgccagagtgaatttggcttctctgattatcgctggtcatagaatttatggtgaaaccttagtgataccaaacacggaatgactcgtgatgttttactatttaatggaagggggagaaccaaagataagcacaaaactgtgtcgagattataaaccgagttctttaaactaagtatgcaatgtctgtgtgcttacgctgcgacagccagccaagaatggcttggggaagaggctgtgggtggtgccttctcccctataccttgttgatgtcttactctaagcatccgcagtgataataaccataaaggaaatgagcacagcagccactcgagcccttccctctccaccccacagctcaccatctgctacctggacatgctgatgaccagcgaggaacgccggaagcagctgagggaccagtactgctttgagtgcgactgtatccgatgccaaacacacgacaaggtatgtggctggaaaacagattgaaaccttccatggtgtctggaaggtctttcggggacctctggtgctggtcacgctgctccagatagcattagcaagtacaacagagagcaagctgcactctttattttccgggatttttgtctctggccaagatgagaagtaagatctctggggcttagagtatcgtgggaatacagacgttaaacacgtggaattaaacatgtaattaaaaggctacgaaaggccagagggctgtgagagtgtacagtgagaggctgaattatgctctgattgataacggttattgctcagcaacaaacataccaaggagtattttgtctttagttcttttaaattcattccataaggctcttttgcagcccttcatcagatgaggctcacttttctccaaactcttactcttcaaggaaggaagaagagcccaaataaatgccataaggataataaatggctctccaattactcatgtacggtcctcattttgaacctatttgctttagtttgcacgcaatcaggttatctgctattatctcacttctgtagggtgtttacattgttagatgtcttttgtggtcatgatctcatttcatgacaatacttataaataaatggggaggccaaactcagacaggttcagagctatgcctctgggatgttacaaagaaaaaagtgacagtaccaggtctcccattcagatctgttggctcaaccaagttatccttgcactatgctggggccacctgtgacttgtcaccagtgtcagtggagaggagaacgctcttacttcttgaggagggacctagagcccatttgaacactggaatcagcagaattaattgggtttgcattaaaagggaccttaagaactgggagagctggcacatgcctttaatcccagaattcatggtggcgactcacacctttaatcctggagccagggaggcagtggcaggtggatctctctgagttcaaggccagcctgatctacaaagtgagttccaagtcatccagggctacacagtgagacctagaaaagaaagaagaaagaattaagtaggaaaatttggatctgctgtatatataccaccttctatggcacatatgcactcatccacaagcagtaattaaataaatacaatttaacactatttctaaaagaagggaattcttgaatgaacagatgaatgaagtatttcatttaagattagtttatgttcccatttgttttattgtaactataatggttatgaaactgtctggccacaaataaagataaataagactgtttttgataggtgaggtctgtgattctggagaagcatctcaccataagtccacagggcataaatctgtttgtttgttttcctttcatggtttgggacattgaacccagagccttgtacatgctacacaaatatttagccacatttttaatgtttattaatttgttcattttaatttttattgtgacaaacgaggttctcataaagttaccaaagcctggtcctcctgcctcagctttccgagtggctgcgattataggcctgcaccaccagaccgagttcctgtgactttaatgagaatggtcccaataggctcaaatatttaaatatttgttgcccactgagtggaacttattggaaagaattaagaggtattgtcttgttggagtaggtgtggccttgttgaaggagctgtgtcacactaggtgggctttgaggtttcgaaagcccacactaggcccactgccttgctctctgtctgcagcctgcacatcagatgtgatctctcatctactgctccagaaccctgtctgtctgtctgcctgcctgtctgtctgcctgcctatctgcctccctgcctgcctgcctgcctatctgcctccctgcctgcctgtctgcctgtctgcctgtctgcctgtctgcctgtctgcctgtctgcctgtctgcctgtctgcctgtctgcctgcctccctgcctccctgcctccctgcctgcctccctccttgcctccctgcctgctagccaccctgctgtccaccatactgttcatggcctaatcctctgacactcccaattaaatacttcctttaacaaattgtcttgctcatggtgtttcatcacagcaatggaacagtgactaagatagttcccagggcatttcttcttctgtagcatttattagcatgtgtcttttgtcctcgtgttcccaagatgactgctgaccccagcacctacttggtgtgttcaagctcaagacaggaaaaagaagggactataaaagtaaataaggccaagtaagaggccatgaagcaaggtagcctctcatagggatgtggacttacacttcgttgtcaaaagctgtgtcctgtggccacctgtagctgtaaaagaggctggaagatatatttcagcttttcaccctcgaagaagaggagtgtgaatgtccttgggggaccaatccacaatgcctgcatcccattcaggccatttccattctcttgttctgttgaactaaacatttattggagacactgaggttgttctgtgtgtgtgtgtctctgtgtgtgtgtgtgtgtgtgtgtgtgtgtgtgcgtgtgtgcgcgcgtgtgtgtagttgtcatatgtcatttcacagtgggatacattctgagaaatttattaggtgattttgcaattgtgtaagaacacaatgtacttactgtgtgtggtggttcaaaagaaaatgcccgcccccaaagggaatggcactattaggaggtgtggctttgttggagtgggtgtggctttgttggagtgggtgtgaccttgttggaggaagtgtgtcactctggaggtgggctttgaagtctcatatatgctcaagccacacccagtgtttcagttcacttcccattgcctgtaagatgtagaactctgagctaccactccagcaccatgtctgcctggatgccaccatgttccaccatgacgataatggactgaacctctgaactgtaagtgagccaccccaactaaatggtttcctttataagagttgctgtggtcatggtgtcttcacagcagcagaagccccaactaagacactgttaaacactccacagccactgaaatacctgatttttataatattccccaatgtgactgaagaacacaatttaaaatatatcttgaagaagtaagaaggataagcagtgaggtgatctgagatgtgtgtctctctagtgttgtgttcatttttatcttcccggaacaaaaccagagctgcaaatgtttcaggccatcctcccctagctagtattgtttcttgaaacaaaagtcttacacttttcacatttactaagtgatgtcataggcccttttgaaaagtcaaaggggagttgcacagtggatagcatttctggctggcacccaagtttgccccttcagcagtttgcaccccactcttctcaacccatgttgtgctgagggtgtgctggtgacatgcagaatggccagcctcacttcccgaatgtcctggctatcagtgtcagtggctatccctcctaactgggcacctggtcaggggcatcaggaagaagccatgcttgtacaggagagaaagcagtattcactttaaaaagctgtgttcaaaagaagccaacgttctgcccaagaatgtcactctggtaacctgagtccacttgacatgtgagcaattacttaaaagtcattagtaaaccaaaacatttttttcctgttgccttcccctattttgctaagttaattatgagcagaactgcctcatagcaggatggtgaggccaggcagttctgaattgtttttaccaagttttaacaatctaagcagaatgtgtttcctgttgctaaagttttcatcataggcaaggtatgttatcttcagaaagatttcaaagatgtaacagaagagagaagaatgtgtacccctacacactcattacgtgtgtgtgtgtgtgtgtgtgtgtgtgtgtgtgtgtgtgtgtaatgtttcctttggatgagttctttgggacatgaaaagcccaccacttgcttctctgacttttaaattacatttttatttatttgagggggtgcatatgtgcatatgtggagagaaggtaacttgtggaattcaggggctctggagtttgaactcaggtcctcagcttagccacaacacctttactcactgactcttcttgctggtctcctcttgcttttctaaataagctgtgggatgggcttctggagtggatgcagagatggcttgtaaatcaaagaaagtggttattgactttgtaacccagactcctgtttgccaggctgccatgaagctctgggtgctatctaagctggcaccatggaccttgcctggaaagtcattagtgtgacctttgcaattattgtagaatatgctatccctggtatcacagtgtttgatgctgaaatgttgcatccatggatggtacccagagaagtctaggccttccttcatcaatcagcaattagaaaaatgcccacagacttgcatacccactattgtaatggaggcaattcagttgcaatttcctctccccagtgtgtctagttgacacaaaataactatgacaaagttgtaggggaagctgtagccacgcctacttaggggctggctacaggtgtgcctgaccatgcctgtgtatcaatttttttttatagcaaaacatttaaaatcctttattctttatttttgaaatatacaaaagccattccctgcctgtagttaccctaccagatcttccagtcctcacctagctgtaacctaggtgtacccacttattagcctttcctcatggcttccttcactgttgtccctggttgccttcattctactagcaacaatttttaggttctgcatgtaaatgagctcatgtgacactcaactggcttatgttccttacagtgctgatttccagtcccacacgtgttcacaaaaatgacagagctctttgtttgtttgtttgtttgtttgtttgtttgtttttaatggctacctttttaaaatggctatctagtatttcgttgcatgtatacatacacacatacatgtgtatacatctgtgtgcacacatatggctcattttctttatgtactcatcagctgaaagacactggttgattccactctccgctgttgagaatagtgctgcagtgaacatgggagagaattctatcactgttttgtactgatctctttcccttggaggatccataggtcagaaagtaattctactttagtttttgagagactccgtaatgctttacgttcccacccaaactgcaaaggatgaatgtaaatttccatctcctgctgataaatatttagggttgggattgctgagtcatctgacaaatatatctttaactttgtcttgctggtttgttctcctgagtgtcagcagcagtttgaattcctactagctgtggctgagagttccagttgtgacccattcttgttagcccttgtggtagtttgaaagaaaatggcccccaaaaggagtggcactatttaggagatgtggctttgttggaggaagtgtcactctgggagtaggctttgaggtctcctatgctcaagctactcccagtgagacagtctacttcctgttgcctgcatatcaagatgtagccatcaccatgtctgcctgcacaatgccatgctccctcccatgatgataatagacggaacttctgaaaatgtgagccactccaattaaatgttttccctttatgagagttgccaaggtcatggtgtctcttcacagcaatagaagcagcccttgattttccaggttatttttctccctcatctttattttcagttgttctgtcagatgtgtgaccgtactgcacttgctctgaatttgtatttaatttgtaatcattaataactagtgattgttctttcaaatagattgtgttgtatacccatgagtgtgtttcgtgctcatttgaagacacatttattcaaatcttttacctatttccttggtggactataaagtcttttattctgtataccaatcctctatcaaatacacatcacataatttgtttcccccacctgtgccttgtcttttcagcctgttgacagtctttgaggaatagaggtttggatttggatgtagtttcccctgtcagcgttttccttgtgtagaggaagctttgatgttttatgtaagaagtctttgcctgatccaagagaacaaagaggtttttttcctgtgttttctattcacaatttatatttgggggctttatgtggtacaagatttcatttttttttgcatatggatatcctgttgttctcgtaatatttactgaatcaacatattattattcacttttacttatttttaaattctgtttgttgcattgtaggattgtagggatgtgcattcatggcacgcatgtgggggtcagaagacttattttaggagctgactggctcctttaaccttacatgggttcaagagaccaggccctcaggcttgcttggcaagtgcctttacccactgagtcacctccccagaccctccaatatctctttttaaagagcagagtgcagagttatatgggatagaagttggaggcacactgggtaactggaagtgaaatgatggtgggaagagtaagtgcttgagggttgatggctctgggtcctgctgctttccagccacttggcattgacaatgttttcctctcaaagtcccctttctcttttgtaataagagacttatcgatatttggccaagctgttttgctttcaattacataatgtgtttatagcttgggagatagaagatgcttagtagtggcagccattatccttctaaaatgatccatttgaatttccaagaactacagcatccctagtttccgatatttgctaatcagaatctgaatcgctcacctaggcttcttggcagcttttaaagtcttcctgtttcagtcattagtaacatctccttcctttccatttgccatctgtgtaatgccagtagtcccttgttaggatacttggtactcttcatccatattcttttcagtacattctcctcctgcatcactcttactggtgtcaagactttgataacacatcattgccttccaccactgcccactctgccctgtccccctacagttcctgtaaggaaaagacaaggcacaggtgggggaaacaaattatgtgatgtgtatttggtagaggattggtatacagaataaaagactttatagtccaccaaggaaataggtaaaagatttgaataaatgtgtcttcaaatgagttcccactaagggcaaggtggggtgcagatatatgtgtgactctgaaaggaacaaggtggacaccatccatccgtcaacttgtctcaagttctcctccatctgagacctatgcttctcagggtttccgtgtaaggattgctttccttagccagatggtgggatcatactaccaggaggtggaagcgggagcatgtgaagttcaaggccaacctcagtacacgttgtactcaagacaagtctgggccacatgagaccctgttctaaaatacacaaaaagaagggcgaaactgttttctttgctggcttggccacacttggagccttctgttcagaataaaacagaagtagtaaagcatcatgggccaagcccccctgcttcttattcctcattcgttattgttcaggaagttggagatccccacattctggtggtcctaagcctgaaacagactgtatttcctcctcctcctcctcctcctcctcctcctcctcctcctcctcctcctcctcctccttttttcaaaatgtctatgtctgtgcacatgtgtgagcatgggcacgtgtgtctcatggcacatgtgtggaggtcagaggactgatgaccttgaatgtcagcccttaccttctaccttatatgaggcaagatctcttgttctcagccaagccagctggccattgatttctgggaacaggcctgtgtctgtttggccctggtcatacgagtgctgggattacaaatactctctgcttcatttgttttcacttgggttctggcatctcaactagggcctcatattttcatggcaagcactgtactcactgagttgtctccacagctcctgggaatgtatatatttagtgatcacaacagtggtagcatctgagtagtcagagagctagcagctcactccatgacagcagtatgcagcagaaccactctcgtgacaatgaaacggatgtcttagtttcagaggtgggaatatgtattcttttttaaaaaaattatttatttatttcgtacacattgttccttcctgcacaccagaagagagcaccagatctcattatagatggttgtgagccaccatgtgggtgctagtacttgaacttaggacctatggaagagtagccagtgctcttaacctctgagccatctccccagcccccagaaggatgtattctaatccctttcttcatcttactctttatagaacttcaatgatttgaaattacttttattttgtttagtctatttcctcctttacctatgtactgaattcaacagtgaacctgaactctgaccctctcagtctgctatatttgccaatgcccttaaagtacgtatagtgtgctaagcttggtagaacattgtacttccatccgcactgtgttccactcctgtctctctggtggaatatgggccacggcaagagagtggatttcctaactgcttgggctccctgtatacttagacataagcagtttctatgaaggccttgcctcttttggaagatagagctgtggaaggtagcattcactagcccccaggaggatccgtattgtcactttgtaagttcggatgtggcttaccaggtatgcggcccatcttcccagacccctgcctgaacagtagctctgaggcttcactcatatggcaaatacagcatccttgtcccatcctccatcttgtcttcaaatctgctggcgtgatggtcagaagaggcttctgctacacactgaagatcccaggcatagagcacactgttcacatagattcttaagcagaggagatgggatgagttgcatcggggtcagttccgggagaacagctgccggagataggagagagagaagaaatgacgagtgccatgtgtaaccgagcaactggacaatcaggctcagctagtccagccatcctgctaacaccaccaaactcccaattgaggagggtgctgcacttgggtgtggagtcaaaggtgaaaggtggaagaagacactggaccgcaatgatcgtcacagcatcacttccaaaggggtcagagaactctgcatatccatgctggcagttgactttaaacatagaacaccgtacggttcagtctgattaccagcccggaatttggcaaatggtatgcttcaaatactcacctgcttccaggctgcctctgagggcttctgtgtaggttaggacactcacccatcacaccgagagcaggctgttggaacaggtgtccctgcagctgtaacccctttagttaggaggctattcagcctctatggccagtgccggcctgttttctgtctcctttacaccttcattgccagttgtatgctcagatcctgaggattctagtaattaataatgaagcttctctctctctctcttgtttaacatgtaaattaggagtctggaattacttcagccattgagcatgcttttccatctatattgttagaattggaaagctgctgctgaaggcccttaaacagttgtccccaaacttgtcattgaactcctctaggcaataaagacccttacccttatcttggtagcatcttgtttttctcagaatgtagttaatctaggcattccctcagtgccttcttaatgctaatttcttaatttattgtgccctttaatctgaaacacataaaatagcagccaattaataaattacacttcctacaactgaaacaaaagcacattaattatttctaaacaattaggctgcattcagcacagtagagggctccagtgtataacaactgctacaggagatgggaattgcccaaattttacatcctataactgaatatcttcttttcaaagcagcctcatttaggaagggcaattaaaatcactgtgcaaatggcaagtactaacttgcctaatttcatgtcatcatctttgagctccacaaaaagatgcagagtagcgttctccatgagccttatcctgtagatgtgtatatcagtcctctaacttgaaaagggtcagagaagcctgccatggtcagaaaaacactatggaaagcaaaagtggggacagattaaggaaatgggactgtcccagcttaccaggagtcttactgagggcctgtctcagctttgcatctccctgagctatggaaataggctgaaactgcaggctgttggtctctctttgctgcatggacttcatttttaggataggctgccatttcttctgcggatgtcatgtaagaaaagcctttcccgtccatttgacctctgaagcccccaaaactttccctgtttccaggtttcacaatctgttggtcttgctggctaaatcctgggagaaataagatgttttggaactattaaaaaaatagacattataccaaaaaattattgtataaatcatttttccttgtttacattacctgttctgggtttggaaatttttcactttatctgtcacttcttgtggcacacaggcaacaggaaacttaccaaaccttctattatgttcctaaagaactacaagaagagcctaatgcccccttaaaagcaagctgtggttagcaaggaggattacctctgcagggctgtgtccacattcttacagagtcaggcccatgtacctgccttagtttgctttctgttgctgtgataaacaccaggatcaacagcagctggggaagaaaagggtttatttcatcttacaggttacagtccatcactgagggaagtcaggacaggaactatcaggaggcaggaaccgaagcagaagcactgaaggaatgctgcttactggtttgctttcaccgtgctcatcttccaagctcctacagagcagcccactaagctctgggcactcaatggcttcatcagaccaaagttccaaatacatccacaattgtccccaaagcaatatagtcagatctgttacagcaagagcccattctctgatatcaaactgtgtcagccaggtttctcaagaggaacagagccagcaggatggaaaaaaatatatatgtatgcactaacaagtaaaaagtgacacacatgactgagtacctggggtatcagacttcacttttggggtggactcaggccttcagcaagaaactacggtcaagttgattagagcaaccaccccatcttagtgccaagacctattttacatgttagctccaatttccacccaccaaggaaatccttgctgcagcttggaaaatgaagtatgcaataatgcctttgggttgataactagttaacaagactgtgtctaacaaaggacagaaggacttttgaataagaatggcaaagctcagggagtgcttcatcccgtccctttgtagaccttgaagattgaacaggcaggttaatggggaaaagtcactaacattgtccatttaaagcaattgctggttatcactttcaatttctatagtggtctcaaccccaccacattaaggaatggagagcaccacccaccctctctagaaagtgtggcgggctctgtaacagcctgcctgtggacgtacctttattgactgagctattgatgctgccataagctcatctcaacactttccacccaggaaaattggtactgctgccatccagcctttcaattaagtacactgtgcttcgagatgtgtcatttagatttgtattaatttaagcattttatgtcaacagacggtagatcactatttgctggtgcaacatggtatctcacaaaatacatacatgtcatggagaagtaattaaccctcttgttctactgcagaacagatgtgtgactgaataagtgctaggatccagggggtacattcaggcatttatttatttatttatttatttattttccagttattagatggttgactcagaggcctcgttgaaagtttcttaaattttgtgctttttcatctcaatacacatacccaaaatataccccatcaccacctttcattaaaaatgggtttggagtcttcccttgaattcgctactcagctttggtttattgtcgtcatgccaagccatagatggagtgactcactgttcatgtgcaaggaagggttgctgactgggaggtcggggaggaggtctatcatgcgcaggacttgattgttgaagacctggggaagatttagcagcggctgtgtgggggcagcaggcttgattgtaacgtgagtactggaaaccagcatttcctacacagactctaggaagacattaagcaaagccaccccgactgatggcaggccatccttgcttctcggtgtcctcttccaactccagcagaagctgtgatatcttgagtgttttctccagcaccatccgctcttgttagatcccataaagctgctttagaaagacctgcttcagctaagccccctggactcgtgttttgatggaaaccttccatgaagagcttcttcaccagttctcacgcaccagcgagaggccccagtcaggctcagtccaggctcgtggttgtaacatgccaggttcttgcctgtcccaggcactttaggcttggctctcatggcctgaagcagccagccttccagaacctctgtgtctgcctggctcttgaccatgctgtgaccctcagctgtagcctcacctcctgagctcagcacgagaagcacttgcctctaaaccatctgtttaggttacgcctttattcatttagcgcagcattctgtatcacttgtatttgatgcccacctgttttctttgttgaggatgtcagagtgacctcatcagtctggttctctggggtgcccttgatgtccagaatgctatttaataaacttggcttccatacagggatcaatgcattaacattgttactagactagcactgaggtaagctctgtgtcacaagtatctctattgctggattcttcatgatgactgatgtacgtagaacaatttgatgatagcttaaatgatggccaatcaggaagggatattcttatacttcatcttccagtggaacagttgaacatggcctatctcacttactcatatctagactcacacccttgcatataaatcacctgctggaaagacagaacatttttttccaatctcattttgatggagttctttctccaagcagtttatgccgtggtgttatgcttcccagaggtgcacatcctctcagaagccaagctgtagtaaaagggtcagtggtctgcactaaactatgaagaacatcagtattacccaatgaagatttgtggagttttgttaattttcttgtttgttttggtattttgagatggggtctcattagctcgggtgggtctcaaacttgctatgttgctgaggctgttctgccatgcccagttgagatctgtacagttttatagttaacaaagtatggtggttgctaaaagaagtggcattctttggaggtgttgccttgctggaggaagtgtgccactgaggtctcctatgctctagctactccagtgtcagagaccatttcctgttgcctaccagatgtaggactctcacctgcttctccagcaccacatctgcctgcctgctgccatgttccccgccatgatgataatggaccaaacctctgaatctgtaagagagccaccccaattaagatattcctctataagagttgtcatggtcatggtgtctcttcacaaaatagaaaccccaactaagacacaaagtaaaagagagatgtctcatggatgctcataaacgtagaatgggaggggcctgtggaggtcaacccagtgatgacaagattcctctgaagcatcccatttgagcaggtgtcaggccccctatgaatgacctttagtggaggtctcagcacactgtctttgagcaggccattctactgttgggcttctgtgacaatgaaaggtgattactctcatgaactgaaagctgcctcatatgatttcatcaggctcctattctgtcccacaaaactacaaaggatgagtaaataggccttatccctcctaccatcaagtaggcaaatcctgggagcactgtggtatagcaaattgcacacaggcctttaagtgacatagctgggacttatatccatctccacctctttgtagctacttgagcttaagttacttcctgtctcagctacaggcttgtcatctgtaaattagggagtgaacttgtttttaactttcctgagatgattaaaagagataaagcatttacaataattgccacaataaatctcaataaatgttgtcaagttactattatcctttgatctgcagctaaccagctctttgaaacttggcctcttctatagaatatggaatatggttcctaccaagggttgatccaatgttggcatcagtcactcctgaaatgtgagggatggttcaaccaacagaaatgcatgcatgcattagcattgtcttacagaatatcatgaaaaactctgtcatgtgcttgttgaaatcagatgattgtgtctcaggaatatttattcaagatatttgacatgctgggtccagactggcaggccttcctggtagtgtttcctgaggaacaacactttattaatcaaatcttggctaagtatcagtcaatggtagataataaggtatatgccacaaagctttctttcggcagacagtacttgctaaccctggtctgctgctgtcacctcctctctgttctttgagaggaattgtagttattccatgaccatatgcataaagtcccagaccatggttcatttagaattattattctactgtttcattatttgttttgtttgtttgttttccatttgagaacagtttctcttaagaaaaagaaaaaacaaaacaactaactcaaataactttccatggtgttggtgttttcccacacactaaggttgtgagtctactgggtcttcttccttttaaaaagtatttttttccttattctttagcaatcccatacaggtatacagtgtacttgctcatatccacccattacaggtatacagtgtacttgctcatatccgctgacctcttctctctcacttcctccatttcccagcatattctctctcacattcatagtctctcctcctcctcttcctcctcatcttcctctttttcttcctcctcttcttcctcctttataacacattgagtccccattaggactacctgcatacacacaggtatggggccatcgcaaaaatggatgatcacccagagcccagaagaaaaatgtctctcccccagcaggtatcagttgccagtagctcctcaactaggggtggggcctcaggggccctccccatccactttgggctgttgactggttctgtcatcttctgaggtcttatatagagaactgtaaatgctgtgagttgatgagtataatggccatgccatgtccagaagacagcttttcagagcgctgtctccacctcccactctggctctccatcctttccatctcatcttccgcagtattctctgagtcttgggtagggctgatttagatgacccatttagtactgagaaccccagtcaccagttttcagcactcctgtcctgactgctgcccactgcaaagagaagcttccctggccaagcttgagagtggcactaatctatgggtacaaacataaatatttaggctgctgtttgacaccgtatccatttaggagaacaacaaagtagtttctttcttaaggtctatggcttcaagagttgtggccttttgctcgggtttccagtacaatgtcttaactgccacctgtggaagagtctcagatccaattagaaagcacttggtgtcctgctaagtcatgccactattgcacagttggacccaacttgcctggatggttaaacatattataatatacagggtctgccattgggaaagcccactggatacttttcaaccccagtggcctgtgtagcaccttctggcactaggacagctagcttgtatgaaagtagtttccaatacaattccagtttgattttctgtcctgcagcccaaatgtgccgtgtcttcagcagtagggtcttacggatctaattatggtggccaaccaagagcattagcaataatctgtgttgttagaggagctcttgggtctccctgaccaataactcatagggaagagccccatgcctggtactgagattttcatttaataaggtatgtcatctgaggaaagcactgtccatccacgcagggtacctcagttcagactcctcctgaaagaaatctcatttttaatagtttactaagagtggatgttctcataagtcttaatttcggtcaacccactcctcacgctctctgctccccatcccctctccctacctcgcttaaacctgtaacacccagtacttccttattctaaaaagcctgcagacagtgtttctccatggtctcactcatcgttgttttaggactgttcatcttagaagcatcaaggtctttctggtttccactgtctcctctggacttgccttgcgaactcatgtgagcacttcctgtgagcctctggctttggctgggtccttctaggagtccctgagaactgggtcctctagtcccattcctcccggggaagccacttgaggttggtttccattaacatcctgaggttttctgtaaatggtgagaaactgtgtttgcacaggctacagatgagcaaagccaataggctcttaaagtgactatctggcatttttgtaaacttacaatgtccttattagtgaatcttcggcttctttcttacaaaaacaaaacataaaagtccaagtagagagacaggcatgcagttctcagatgaggtgggagcaccaccattcttcccaaggttagcaggtcggcaagcagtcacagacttgctttgcaaagccagtcgtagctccagaaaaggaaggtcatttgcttctgtgaaaaatttcaactctctctgtttggtttcatccctactcccccccccccaacctcatgttcacttccactcacaacccgagaactgctcttctgccaccggctgccttctctttctcagctgtgggtgacatcagcagtatgttcccgctgctctggcacttgcgatgccaggactactgatgaaaagccacggatgctgcaggtggacaccatggctactccagcccttccttctgctgggctcctgccttgccaagttgtcctgtatgtcctcacttggcccctcctcctccaccacagcctcccaggtccactctgctgttctactttctaagccctcactctcctgatgtcagcagatgagtaagaaggtcccttagacacaagagccttcaccttctcaccccagccagttcggggtgccgctggatctgctcccatcttctcattcacccacctcttgtaggaagtggggttatctgctgaagccaggcccagccatctcttccatggcctgacacctccttggtctggctcctcctttccattccctcacacagtctgtctctcatgtccattgcctctggctcagtggcttaaacatgatcacaactttcccacaaagataacaattttttttccaactcagctttggtttgtagcccccacttcctcctcagtctgagtagccctggttctctccagccttcccatcatcacccctgaagctgctgggtgctgatgtcaccactgagcctgtgatctccaggcagcagcttctcagagtctccctgctgactcctcggttgcattctccgccacccccacccctcctcctaggaatacaccccttatgttccacggcttcctctacttctcccattgccccttgaacactgatgttttcctcagttgattggccccctctgctctggtatcttcagcttttccatctatgatctgccttgccttctggttccatgcacccttccccaagacagtctgtctacagtgatccaaagtgatcgagccctgatcactgaaaccaggcactgggccgctgtcctagagccaccccctccctgcacccctactctccacagacagtttgctccccaatcaccctaactggtccccactcctttggtttctccatctgtcactgtatttcacatagattaaaacaaactgattatacgtaaaattgtaccatgtctctgtttctcctccaggttcaaattcaccctgctaccatctccctggtaccttctcatcctgtctctaatcctttgccttctttcctgctctccccataagctggcaacccaacctggtgtttccagactgtgtcttgttctggggttagtctccatgttaaggggcaaggagcttttaactgtgaagaaggaacatgttaacagcaaatacctgcagggttagtgggaagcaaagatgacaatcccgaccctccctgacaccaaggcacagcaggcagggaaaccaaacagcttactctcctgagctctttgctttctcctgaagttgcctgtggaccaaccaccatctttgtttctgtattctacgctgatgcttccacagtcttcccaggaagccttcactccagatcctggacagcaaaggcctctctctgtccctgaactccgcttgtcccagagcttgtctcctggttaccaggtgtgagatttagaaatgagccatgtagcgttgtagtcacatgactgtaagccttgccatgcggaggctacttgtcatctgaacctgctgtttcaatggcctccacgtacagtgcattgaactagagaccatctgaagggcacagcattcatcatggtgaggctttattgatcacttcttgtatctgttgtaaataaactaatttgtgtaaagccaaagggcatggaagaacaattataaattaagtagacaaaagaaagactctaaaaccataagcacttgcaacagcttataatggtgttgtctggaatgtggcagagactgtcccagagactgaagccaaaggctgagctcaggccgagagagatgactaagcagttgagcatacttgctgctcttccaaaggacccaagttctgttctcagcacctaggtcaagcagctcacagccacctataactctagctccaggggatctgagtccctcttctggcctccactggaacccctcccctaacacacaaataaaaacaattaaaaaaaaatcaagtgatgagtctgaaaaagccacgtaatctccaaggttgactgcacacgagagccactatagcatattctgtccctcgtttgccaaagtggcctgggcctgagttcttgagagctctttcggggaagctgcacacacacacacacacacacacacacacacacacacacacacacacacacacacacactcacagctccaagacctccaggagagccatagctgaaggaacaaatacagttttcctgagggaaaagttggagcctctggaaaccctgagtgtccttcctgggttgtgaagagggattttgtgtgttactgtgctcatgcagagtgtatgtgtggatgtctccctgtgcagagtgtgggtggatgtgactgcctgtgcagtgtgtgtgtgtgtgtttgtgtgtgtgtgtgtgtgtgtgtgtgtctgcctgtgcagtatgtgtgactgtctgactatgcatagttgggcgtgactatcagcctgagcattaccagtagagtgaagaggaagactgttgtagcctcccagagtaaaccaaagcctctgatgtataaagacaagcagatacagaacgttccagctcctacccatgatgagtgactgaagcctccaggtcttgtccacccatgttcttacactgagaaaggggtttttatattagcttacttccagaaaagaaacccttacacatttcagtttatgaacatttactaacattgttttcactttcaaagtcatctgtaaagttaaatgaataatgagatggcaatggccaggccatataatttgggcacacgaagagtatgacccaaaatgaaaataaaaataaccagaaaataatgttctcccaatccttcttaggtgaccacagtacccctagctagcaccgggcaccctgggatgagaagaaatgataccatcttgtataccccatataccattttaggatgtccaaaattttctaaggaccttatattacatcattatagtttatatctatactatttggagccaaaaagatttgacattgtcagcatgccagctctgatgaaagatgcccaagactctggcacagtgagcacttctctgggggctagaatgttctgagaatacatttgaggtctgtacttccagatttccctgtaattcccagcaggtcctgtgtgagatggcttgctcctctccagcctttctctcctagtgtcatggggacacctccactcaccctttgggaatgtttatggaactccatcagatctctgtctgaaaggccctgctaacagtcatgcatgcttggtttataagatggttacaagaaaatggaggtgggggcagggtgccaaacactgccagagcttttatctttgacattacaaagaggtccctggctgagggccaggctggagtttacgggaatataaaatgcagacatgtgctttctgttggtggggcgccaggaggaaggcgcgcccgccacgcagccagacagcacttcacttccatgggatgcacagttgctaggaagagcatcctagtctcagtggttcagagcaaggtcactcatggctctccagtgggacaaagaagagctatgccatatgcccggccttctctcctcctaagcctgccaaccctatagcctgggagcgaccactttctgcagtgactcccccctcccatgcccaccacaggagcacccaggctccagaagcaggtctctgcaggaattaattgctctcattgaaagaagacaaaatggacctcctctgcttttaagcaaagttctgaagttgtttcccttgaactgtgacataatcctcttgaacatttgctcacttgacacatggtatgagatttctggtgctgctttactaaacataataataatttattagatataagttccggtggatttgtgcaatccagctctgaaaaggaaaggaaaaaaaaagattagtaggctactggaaactgcactaactcatattaagtcagggtttatgatccctgatgagataattgcctttggtttcttcagcaatgaccttctttgcaagtgtctctagatgtgtatcccaggactagttatctgaaattgctagtgtggaccacagctaaatcccccacttgtttggggaccacgggttaggcgatctgaagtgcttgtttcaggggataagcaaatagataaagggcctgggttttggatatttgcccctactgatcatcgtgcacacggatgtaaggagaaaggcgtgaattaaacagccagagtcaaagtcttgggctttggtgccgggttgagtagtccttgtcctgtgccacatgctctcagtgctctggctggggtggtgtgggaggaagctcggcttaaaatagaatgaagggggaagagaaaaggaaggggtttgcaatttgcaagaccacagatgcccaaagtctctcctcagaatttaaggactctcctcaggcacagcagacacctacataggtgaccaatggactgaaatgattagcttccatctccatggtaacagtaatcaagttctcacctggggaggctgaatctgaaggctctgctagctctgggtcttgcagctggccagctgcagagctaggagttgactggagttcctccatgctgctttggtggttcctgccacacagcgcctcctgcacagaacttgctgttgttcacctgtttcattccagtgctggggagcaaacctcaggcctcacagctaggcaggcgctctagcacacagccacccctcatcctgtttgtaagtgtctttgaagcaactgcatctcacccatcccaacctccaccatcaggatgttgcttgccccttgcagctaacttgagtccgttctgttgcagtttaaagcaatttcctgtctgtttgcagaggtgagtgagagcagctgctcctggagagggacataaaaaagattaaggaaccagggctgtggtttcagtctccattaaaacaaaaacctgtcctgaaatttgggggtgtactttatcttaatggctgcctacattaggacagttttcctgtaaaaaacctttgcatttttttcccagagtctcaaacctcccacctcgtgtttacagaaggagactggcagggctctctgtcggagtcatgtgcgtttacagctgcacaagccatccatctgacagtttctccgcaaacgtgaaaagaattcgtttgaatgtgctttttgtaagccaagccagtggccttctgacttgtgtaatacccactgtgtattcccagaggcatatctttcccgtatgggggagggagcatggaggtgctgccttaaatatcctcacataatgtttaacggcctttgcatgttggtctgtcatgtccatttcctacagaacgctgcacgtaaaagccagccttcagcaggctccactggtgaggctcggctctcaaagagccctaactcaccagttagaacttttttaagttcacgtagacctggtgttgtagaagtcattgccctttctctgagacggagttttctcctgtgggatggggaggggaaatgtgggggttccaggtgtaaaaggatttggcttttctaggagctctgctatgacgtgaacaatgctttcctcctggaagttctctgtagctggagatttaactctgaacctgagattgggggcaatgtgttgccttgtagaactgtgtagttgcgacgggacctgtttctgccagagtaaaaagcaaatgtacctttgctcacaaatgactaattggaacacacagcaattggattctatctcaagttgagaattctttcatctcccttcatatcctttgcttctgccatgcccatcggctgctctggggttgctacaacagtgaatgctctagtttcaacctttttccatgttatgaaagaactattctcccccacccccccccagttaaatctgaactgctttcagttatttctgccaacggaagtggaaattggttccagtcgagatatttcctgttcagcataaaggttttttagtgagcctgtatgttaatctattagtcccagtatgttgtccatgaacccaagtactgcagtcaaggacactagagattagactgtttccatcccggtttttatttcaggactctcatcttctctagagaacaggcatgatagttgaaccttatgctacttttttaaaagtaaaagcatgcccccttttccctttagcatactagaattattgcattactaggaaagtttgtaaataaatgttcattaattttccttcccatcctattctcctctctccaatcaatttaattagagtcaacatggggattggataacaggaaacacagggaggcagcttgcctttcctcttttccttttctttttaataagaaccatctgaaattaagctggctcaggagtttcaacatcaaactcttgcaaaccaagcgagcacagctgtcagtggcttcctgttgcaagacagacctggattgatgcctctaaagcttcatctgatgttgccagtggccacatcctgaagggtatgtttgaccacctgtgccaggaccccaccctattaaggaaacttggctccctcattcatggtgactactggctcctagaaggcccagtgtctgcatctggccagttgaattcagctatgttgactggcatcttttatgtggcggtgagatttttgtggaatcatctgtttttatatacaagaaaccaactctgggtatcagtttagcttctgtgtagcaggagtatatatgatcttgacccattccggggaaagggggtcgggaaagtttgggcaagagagcttgaagtggcttaagaagatgttttggtagaagccagtgaattccactgagtccactccccagctagctcttgctgctattgttttgagagtgtggatcctgagccagtgtgggatttcttgtgttggctggccacatttaagttctaaattatgaccagtatctgggtgtttggtaaaaaaccacactgcagtggaaacatagtcatgatggcataatatcagacttgagtcaaggtggaagtgttatattcacgttaggctgaatcttcccacgtcagtcaaagaggtcagggttgttcccccacgtggatgcgcgtaaaccaattcaatatagacagtctctcattgggattctcttgggaacttgggaatccttctgcttatggttctgacatcttttatcatttgtagaaagcttgtttgtttgttttgtttgcttgccttgctcacattgtttgcttttgcttttgcaatgctaaagatggattccagggccaggcacatgctaggcaaactctctaccgttgagctgtgtttctagccctagtaatacatttgatactttgaaggtatataagcatggaatgaatatttttccatcttctaaaggcaaataggaaggccacctgttcaagcccttttatattaattggtaaagctgatattcaaagaggattttctgtttcctagataagttgtcctgaatgatagcaagtgttgttgatgtttttggataagcaaaaaacagaaacaaagatgcatgtttactgactgatttcacacttcaggacccggaagacgaacattggttttttttctcatgtttttgcactgtaaagaatggaaggctgaagctgcacttccttttctgtttatcttcacaacttctaagtctatacatacacggctgagtgtggccctatatcctggggctgggagaggtgagagagacccctctgtggacacagatgtgaggagctgataggagcgaagcgagttagagacccggactgcggagacactgaccacagtggaacattccagcaagtgttagattcagctctgagccctggagcatggcctcctccagctccaacactaagtcctctcatcaccgttgttatcgaatgcttgagagcgctttcagacatcctgtgcttttgttcagtaaataaagacttagggtcaacccccaagaagagcccatcacacatttagttgtaatttccatatgaaattgcattcttttggggccatggtctcactcacctcacgcacacatactagacgagtttgcagtccacattaggagtttttgctgttttttctagtgcaagtagtgaaccatggttgaagacactttggatttatcagctcacagataaatttcacccttgaagcaagtctagaaaaaggcaaattcagattgtatgaagatggtctagagtaaggaggctgggctcggagccagacagaccagcagccccgaatcctgccttggcagtgagaggtggaagctgtgtgtgtctgttcctcagtcttctattgtcctgtatgtgagatgggagggttgagacacatgcagagacatctagaaatttccaagtagacattccctcttccagagccactctaaggccaatctgctgagctctgtaacacgagaggctctgtgcttggtgttggggaaagaaaggaacagagaagagttgagattcagaaaaactaaagactgtgttcagctttagaaaacttacaagcaactgtggctaatgccccaactgtataaactgcagcccacaaactctgggccacactggcctctgtgcctttaggcctgcccctgcttcagagttacaatttgctgtcctcctctgctgctccttcactgctactcaaaacaacattcagtgaggccttccctggacactgtaaaactctcccggagccccccagcctcttccctgtgtttcccatctcagttcttctgtgtaaacagtatgattggctgacatttttttcctgctccaccccagtgcttacagaagtttctagtaggcactcattacatgttaatagagttaatgagtgatcaaattaataaatttcagaatcagaaagggccatgtgaagagctccagtaaccagaagtccagaaggtgtgtgtgttgggtttcttcttggctgtaacaaccaatcacaaaccaagtgacctagaacaatatggactttttatttgtaatcctgagcccatctcactggatgagaatcaaggctgctgcattcctttccactggcagcaggggaggagctgcttgcttgtgaaaagtctctagggccactggtgtttttaattcattctgtcctccatcttcaaaggcagcgtggctgcttgagtcctcaatccaccccccaacacatatgcacgcatgcacgaatgtacacaaatgcgcgaacacacacacacacactcacacacacacacacacactcacacacacacacacactcacacacacacacacacacacacacacactcacacacacacactcacacacacacactcacacacactcacacacacactcacacacacacactcacacacacacacacacacacacacacacactcacacacacacactgacttcctcttcagcttttctcacctatttttaattgtattggacccacctggataatccagaatggttcctggttttataattatctataaagaactcttaatctaccaggtaacctagcaccacaggttctggggaatcaggacatggataccttcaggtataaatggaggtttctttcctgcctgacacttaccaaataaaacactcagaggcttaacattaaatataattgtttggccaatggctcaggcatattactgactagccctcacaattaaatgaacccatttagtttatattttaccacaaggcttgtggcttattacctcacatcttgcttctccggcagctacatggtgtctccctgactccgtcttcattctttccatatctctgtttgtattttctgcccgtctctattttgtctggctattggccaaaacagctttattcatcagccaacaaaagcaacacatatttgcagcatacagaaggacctcccacatgatttgggatctattactctgtccgctataaggactggcaagcaaatgggcacatttaaagatagatagatagatagatagatagatagatagatagatagatagatagatagatgactctggcggctgaagcaggagcataaaatgatcagtctgagactttaggagatgaacatgcgcttggagcaagaacacagagggagactggtgtgcacctctccacagatagataccccatccctaccccttctgtggacacaaggctgggtttgcctggaggacttcctaaaaggagagtgcatgtgtgggggctttcctaaaaccagcttctgtcagacacacattgcacatagcacagacagagaacgataaagtcccggtttgcagacacacagcactcagttctaatactcacaccaaacatggagtcttgttttcagggtcttcactgctttcacgccttttcctgaccgtaataccagggtgaggtattcctccctctggtaacacagaactgatcctgacactggttctcacaggcattgctctgttcctggggagacaacattgagaggatccaggaggatgcctggccttcaccttgaccatcatctggtcttgccccttctcagtttcctggctagctcccactgggcaccatgcagagaggtgtggatactgaatgatagatggagtggtgcccacagtgtgctcccaccctccgtcagcctctttgcagcggcagtgtcccacaagacatcgtgtggcacagcactgtccagtgtgatgtccagggtgtggcacaatctcttgacatgtggataggacagctgaggagctgggcttcttactgtatgtagttttaaccatcttaagttgaaatagtcacaagtgacaggtacccagtgtgttggacaatgtaaggaagtgacagactttcttctgttgcttttatcattgctttccagtattctaaagacccaggggacctgactgactgacgcagggtggactgcagtcactccccaccagggaataaaccagggatggccttatccatgtaagaactgcatgaaggtgaactgggatggcattagtagcacacccagcatccagccgcacacctgctcagtgcccagcgttccgctgcgtgctgggggctcattgacaaacagggaggatggaaggcctgcttgtgagatagacatctgagtttaatagacagcagcacaccatctcgtggctttttccttctctctttttttttttttttacatttttaaatcattaaaatatgagacatttttaatgtagaagtcagaattggcccacatgagtgtagtagacttgccctcctttatgctagctgtgttgataagccatgcctggtcactatcctatttgcaaaaaataatggctcttagaggaaagtgtgtgtgtgtgtgtgtgtgtgtgtgtgtgtgtgtgtgtgtgtgtgtgtgtgttaaattctgtgtgcatgtgatgtatgtgactctgtatggttgtgcacatgtgtgagtgtaggtgctcttggagtccagaagagggcactggctcccctggagatggagttacaggtggttgtgaaccatccaacacaggtgctgggaaccacaatcaagtcctttagaagaacagcaagtgttcttaaccactgagccatcgctgtagccccaaaccacagctttataaaaactctttctcttatactttcctaaaaacgggtttattgctgtatacttcacttgttttgttcactcagtttacaacataaggatcagtgggttttagtctctttatggagttgtaaaccaacatcatggtcaattttagaacatattaattatccctgaaggaatcctatcctttagtaatcactccccaattccttctagttgctatagccctaaccagacaccagtttgccttctgtctctaaggatttcccagtctgggaatttcatataagtagaagcatgtaacatattgtcttttaagaatcttttattatattttcacttatattttaatttcattggcgagacatgtgtgtgctatgggacacacatggagatcagaagacgacttctaagagttagttttctcctcccaccacgtgggtcccagggcttgaactcaggccatcctatgtggcagaagccacctttgcccactgaaccatctcaccatctcagaatgactggcttttttttttttcactcagattaatgttttcaaggttcatccatgttatagcatatggcaatactctgttaatcttattactagtaatattctgttgtgatgaatttttatttatttgtccatcatcagatgatggacatttgagttgcatcacttttggactactgatatttgcgcacatgttttggctaaacatattctcaattctcatggttggctgcccaggagtagaactaatgagatactactaacactgtcaggaacacagtgtttcttctgtgtttgctggaagcttcatagcaaaccggccacaaagcagcagcaatacggtgctccatcacacattttcttggcataaatggtaaggagcacatataggtcaattgtctgaggagctgaaaagcccgtttttcaaagccataccactctctgtacatatccacccatggagcatcagcccttcggctctctctatccctaacgatacctcctgttccttgcttttctatagcctgggctgggcaggagatggcatctccctgtggttttgaattgaatttccctaatgattaatgatgctgagtatgttttcatgtgcttgtaggccatttgtttgtctttcttggagaaatgtctgttcatatcctttgcccgggttttaattgggccgtttgtcttctttgcctgtcttcccatttggcctgagcaggatgctgatatgctgacgggtgatgagcaaatatggaaggaggttcaagaatcactgaaaaaaattgaagagctgaaggcgcactggagtatccttttacctgtgggctgatccacgctgttggttgcttctttactgggagcctggtgccgctggagccagaccccggatctgaaaggtccaagtgctgcatccaggtccagcagcagtgtggggaaccacccaggaggaccgcagtaaggtctgcacagatactttacaaagactttaccaccaattaatagtatggcccagtcatagtgggaaggaaagtcctcttcctcttcctcccttcttttctgtgcaaaaggtaaaactggtagaccctcttcctcctataagcaccttagtctctggaaaggaatgttagaatccctataagttaataccactgaccctcagacctacaaaccagtcacaaaacagcagcaatggggttctccattatgcattttcttggcatgaatgataaggaacatgaataggttaaaggtcagagcagaaggagagagcatgtgatgggatcatctgggatgacccactggaacttcactgtgtaaaggggatcccaggtcagagacaggatttggacaggcagaagctgtgacagaagtcactgtctgtctatagaggactccaccgggacacaaatgtgatggcggaactacaggtaagaaagagactgtagagtgtggaaaggtcaccaagaggtcaccagatgctttgggttgaaagatgtctccggcactaacaaaatctgcaaataaggtttccagtctacaatgctgttagagaactgtgaaggacaggaagatgggtaggttctccttttaatagtgacctatgtaattacagaaatcattaactcggtgggtttgttaggtctgactaatgaactacagttggttagtaagaaagaaaagaaggctgccacgaacaggttgctttatggttttactaagaacagatccatccccagagtcagtgatttttttttttttttggtaaagtttgcacctagatttcatgagagactttgaaaagaaatagccaagacatctgtgttctatactagcagatccaggcatctaactcaattggcaaatgacacaagtgtcgatctggggtgctctgcctcctgcacctttgattcagtacctggaatgaagagactatccaggcacgtggagatgggaagggcagcagagaaaggacaacagaaccatgagagcgacggctccttggcagactgcatggtgactgatcttcaggagctgaactttgacaagagtgtatataaagtcgtctatttgtggcaggaaactgaagcatgtgaagctgcataaagcttggcagcagagcacaccagaggattatatggttttggtaaatagtcaaatttaataaagtgtacaagtatgttataactccccaaggacaactgtgatcttgggctgcagtcatagaaatacagaatagaaaatgagaaaggaagtggtaccgggctgatgctctctggaatctcagactcagtctgggctatggcatattaatagggctgtagagaaattaaattcgctacgagcactgggacagagctgagtcgtttgaaactccaccagtcaaggcgatgaaagggactaggaaacagcatgctcaggggtgacgctcagaggcttagtgttgctacacagctgaggagtcttgttttccgtggtcctatgcagcagaaaccaggccatagaggaccaaggtgcatttcagtctcgcctggatgaggtttaagtggaaactgactcgacaggtatttggctagtctaatctaccttgtgattcaggcagaaattacaagacacagtccaatattcaaaactctcacatagtggggtagtaattatgcaaagcactatgtgctgtggttcagatgagtatttcttataggcccatatgtcagaatctggcccccagggtgccccttatgggaggtatggcagacctttaaggggtggaacctactgagaagtcattgggaagatgccttcaaggaggccatcagtcctggtctctcagcctcactctgcttcccatcttgacatgtgaatgcgtattctgacacccactctcacctttgccctctggttacctcaccggaggccaaaccaatggggccatctgaacttgttcttgaacctccacagctcacaagcctttcattaatagggtaccgcacatcagacatttcattataatcgtgcgaggcagaatagtacaatacatattttggtaaagatacacatacatacatgtgcacacacgagagagagagagagagagagagagagagagagagagagagagagagagagggagggagggagggagatagatttggttttataaaggaggtgatgactgactgtcctgtatctggggaggtgagttggactttagaatagccatggaggagggtgcctcagagggaagaaatatgccagtccacaggtgacattgtgccacacaggaggaaagagctgctggaaatggccgcattttttttttttttatgcaaaggggcccagaatgatgctaagcagaatagcatggctagatgggctgctctgacagcctgtcctaagaagatgactaattcccaagtgactccactcccttgtctgactgtctgtcctcacccgtctacagtcaggggcatttgaaagaaagcccccatcgtgccctcggggtcctctttggcatagagctcactggaacagtggttatagcagacactacaggtgccaaggataaatttctgggcagataaatgtctgcattaacttggaaagagccttgtagtttaaactgttcctccctcccccttccctggagcagtttacatgaaaagttttgccttgtttgccaggagagagttgccaatattgtggggagagattggcaagaggtcctttcccgcttgacacagggtgtgtggatgtatctctgtgagtgggtacagcgtatcacatctggtttccactcctaaggcgtctcacctcagctgctcatgaggtggagcacttcatggaaatgagtagacaagcaacagtgggatccatcgaacgatgttacaataaggcccgaccgagccttgccacagaaatgtctggcattgtgtaagagacagccattcctcctgacagcttgtcaaacatctaatcctggaatgaaaagccatgaggttaagcatggcagtctgtttcaaaatcagcacattgcctaagaagccgcttccccaacctctggaggacccgctcagcaaacgtgaaacatccatgtcacaggaatacaaaagaaaatcaccaactgtcaataacttcaaatcactgtcttcagtacgtgaaccccttctgggatcagagccaggactggcccctaagaggtgacacaaagctcctcagcttgcagttcttcccaaggaaatgacgctctggaggaaggtgttgtgcctcagctgagaggaagcgtctcttccagtcggttcatgaagatagtattcccatttgcaggtggggcttggctggtgaaaagcctcgctggtgttttggaagcagagctctgcagggacaggcagtgcacagtggattctgtggggggagggagagaggaggtttgcacacatgggctgtctgttccggtgaggcttgctgtcaggacactgacgaagaaggctacagtagaggcttaggagaagagcatggagtatggtattgtaaagagatggggagaggagagatggggagagggagggcgactccagcctctttcccttcagcctgtcaggtcaggggttgccacaggaaggagagtggtatctctgccatatgctttgcatgccccagtaaactttccaaccatgacacccagaactctgcctagctcatgggaggacacaagaagatcctccaatttctagatacagtgtcttatttgatagtcactgagacaggtgttttgtttctagcctaccttgaagcatttgactttctcaaagttcaaaacctgaagacggtagaacaagcttaggtttgaaccaagctctatggatgatgaaagctctggactgtttcttctgtagtttgaatcttcagaccactttctccaagtggaattctagcatcaaagcagaatagcatagagggacagtggcaggaaatggggagagggcggagagatgcccagtctcagtacgacaggggagcagaggagcagtgtggtgacccccgttgggcccggcaatgcacctttagctgggcatggaggaagccccatgtcttcagccctccagcttcctctgtaagaggatgcagatatccgtctgcaaaggcggggttcaaagctggaccaagtaccacatacctgtaggcccagctactcaggagactgaggtagatgggttatgtgagcagggattagaggccacctcgagtatagtaaggggcaacttacagggcgtggaatatcacatgtgaaattaattaccgatttaattggcccgtgattaatcagaagtcagtgccactgagcagcacaggtgttttcccttgctcagggcacacatataaaaactgttcttgatagttttcttcctttctttctgttgctttttgaggcagtttctggctatgtagtcctagctgtcccggaacttgccatgtaaaccaagctgccctcgaactcagagagatccacctgcctccgcttactttaaacccaatttttgggtttacagtaagaatacatttatttcagtggagtttaggtttgagtcacttttgtgttataacgaacactaaatataaagcccactggaaatgcatttcttcagatggctgcacattctgcaggcctgcacactggtgtggactgggctccatgcacatccaggactcagatgagtcagaagcaaactcatgctcctcctttctcagaagggattctctcttttaaacagaaataattccacagtaaacaatttgaagctgagctcaagcttcagtccagtttaataaacaccttcattcatttctcaactaagttgaaggagaaaacatgtagacgtgtgaaaaaggaatatttcttggggacttctaattctcctaaagtacaggctgggctagaggacggtttgttgatgtaaaccgacctcacttcggtaagacggcacttgaacgtgcttttgtctctcaagtatgtttccaggcagctcatctgtgtgaaataatgggcacctcctccctcccgggcctggaagctcttcagccttttagacatctccgcttgcttctgtgttttcttgatgaagacaatgcatccttaactcagttaataacagagtgggagcaggttctggccctgtgccaggcgatcataagcagcaactctgaccggcttcccgacatcaacatctaccagctgaaggtgctcgactgtgccatggatgcctgcatcaacctggggatgctagaggaggccctgctctacgccctgcgcaccatggagccgtaccggtgagtgcaaggcaggcttgacgcagaggtgtccgcacggcccacatgggacgcgatggccgtcgtcaagtcactctgactctgctgtctcatatcaagtgtcccattggctctaggtgtatgaaactagaccccgtttcattcattcctgtttcttcacacatttcatcagtcactggcaaagccgtttccaggttcctggcaatgtgcttgttcagtaacgagttagacacggtctctctgtggaactggcgattgcagtacagtgcgaggtttgcagtgacaaaggcaagcagagaggcgggcagagaagagcgcgtgactccctcctatctttgaaccactggtccaggtgagggaggcggatgtgctgctctttgattggtttgcagtagtgataggtccagattgattgtcagaattgatatttgtcacagtgctggtatacagattgacccttatagccaccttgtgactaggtaggtgactaatcttcttcaatgggtcattgcattggcgaagaaactattggtgaactatgggtaacccatcactctgtgtgtgtgttggggggggggttcatcacagtgtgtgtgtgtgtgtgtgtgtgtgtctgtgtgtgtgtgtgtgtgagtgagtgtgtgtgtgtggtgtgtgtgtgtgtgtgtgtgtgtgtgtgtgtgtgtgagtgtgtgtgtgtgtgtgtgtgtgtgtgtctgtgtgtgtgtgagtgtgtgtgtgtgagtgagtgtgtgtgtgtgtgtgtgtgtttgaagacaggatctaggtctgtggcccaggctagccttcaacttgtgatcctcctgcctcagccccatttccagtactgggattgcaggaatatgccaccatgcctggaggagattgactgcttcttgcctctgctcttctcctccaggtaggtgggtgtttgctcttgggtggtcttgcaatgtggagaagttttaagggaggcgaggttgaaggcaagggctggaagtctgacactgccatctgtggggctccagttttccctgggctaagaactgaggttgagtttgggaacaagccaatggggagaaggtaggccaatgaatctgagatcaggttgtccagtgcccagcacaggacaaggttgccactgagaagatacatggataggtgggacatggcaaagcagggtgccattcctggaggatgtaaagctccccattatgcagatggcgctaacacaatctggccaaagagggtgaagctcagggagtatccatttctagacccatgggacatgggacaacaggtatagggatcggttccaagtgaagcaggtggggcacagcctgtccccactggaggggagcctcgggtgacagatgacaaggaggggaaatttaccaggatctgcatggcaagaacagaatcagggttaggatctagacgtcaacagggaaagagatatcaagcctgggagacccgaggtcaacagtcagatctgggtcagaactagatgtgcgccaagaagagcctgtagatagccaaggccccactaccaagtagatgccaaagacccacagaccagccagtggcaccagacccaagggtgtttccagacttttggcaggtggctgcttttgttcccttgtggtgagcagctttggaactgtctgtgagtcagctttaatctaactgcctggaggactgagaccagagactttcccatgagcagtggaatgtctgttcagggtgaggactcttgtgggttttctgaaagtatgaatcgaacacagagagataaggctgctttctcagagccttactgggtgttgacacggcaggcaaacccagatggttaatgcagtctctgaaggctggggcctggcctcaggagcgcagaacacaggcagcacagtatatggatggacccaggccaggagctgcagactgagaaattccatcattctccaaagccctgtggcagcactgccccaccccccacccccggtctttggagcagattctctttgccccgtggtccccttctatttgccgtccccttctatttgccgtcccagctgccctgccaaggccaactgaatcagtcatttaaatgccccaccagatggcactaacagtcccaagtgcatcttgaatcttcttttgtcagcacttacacagatttctgcacagcattggcctagccctagttggcgatttgattgaccagcacttgagtcagacagctttccgcgtaggtgaagccatgtcctccacagcatactcccttgtgtttgagaaaattttggttacttttttttttttttttttttggtgttggctagtcacattctctctgtaaatgtacgttctgtccgtgggcacatgacaagtttccaaacctgaacggtcctccctggggctctataaggccttctttacagcatgctatactgctccacttccagtgagtaggacttgtaccatttgtcaccagaggccctgtagaagcaaaggccagtgacattctagaaccaacacagttaagagaaacaggaacacacttagttcttttctctttagctcaggagaagtgaaaacaaggaccacaggccacatgaccatcttgaacaaggtggtgatggttttcacctgtggctgcttttgctcccatttagccaaggacacagacaattagccaggtctgggttactgagaggtgactggactgccatcggcaggaataacttgacgatgtcaatctgctgtttgctgtgcctggattgaggtcaagcctctaataatgagcgctttgtcactcatgacctcagctcagctttggctgttgaccttggaggacagagcccagatcccattttatccacacactcacttatttttactcaatagattctacttcactttatgatgcaatttaatacattggtaataaaataccattttattaaatcttccacaaggcaagttggaaagacagcagtgtctagatcagctcagatacattgtcctgtagaagtaaatctggccttcagtgcccatttagcatcactctgctatactctgatccaacccactaaattatttcactcaggatgccttaacagaatcccagcatctaggtctgagaaatgggaaatgggggatagaacttagaaagacttaaaacttaaaaaaatgttcagaactaattttaatcacatataaagcacatgctttatgattataaaaattggtcaatatacttctgtgccacttatttatgtattttgaatgaaatccacattgagttttcagaaatcctccaagggtggatgaatggactgtcaattaaattgcacaaataaaattggtttctcaagcctcacaaatctgatcgttgtagagaatggtgataacatttgtgaagaacagtaagaggtccttgagagaaatgaaaagatggggattgaatgtccttcaaaattgtagtcccagcttttgagatagccaagttattttgagcaagaaaaacaccctctgaactagttaatataaagcccttgagcttgttaaagtagactgtcttgaaaaatggttaatgttcttattgttcagtgtattcaagggaagtgtccccgccagctgctaagaaagacagtgggcagccaaagccccagaacaaggaggggacactgctctggtagttgtgtgtgtgtcgaggggggagcaccctgctttacactttgcagagagcaaatggatgatggacattgctctttctacacaaaggacaccaatcatactaatgccgcccttcagaattaaagaggaaacaatctgctctcacttgtaatgggaaggatcactgtaatgtcctcccagagtgagataaatggagttcaccaattgtagaggcatctgccagcgatttgttagcatcagtgttatagaggagtaggtgaaaggacctgaggagccctcctccacctctcagcattcttaagcgaaaaggtgattgctgtgatttcttaagaggctgctgtgctccaagcaacttgcccatccttgtgatcctcacagccccagtgaggaggagcttagcctgtccacctgctcgaggatgaggccggtactctcatgactggctctccagtggtagagccatggcttcaagctcaacactcaggtacatttcttttatttcttttagaaaagcatttgagtcagagtgaatttgagttctggattggatagcaaacgtcccccatttctggctgtggacagctctattcatgttggagaagctgccaggagagtacatctagatagcaacaaaatgtctgcaagcatctctggtacatttcctagagaaagataaagactggtgagatgttgttaccgctttgaagcagccgtttcggctccctagttattagtagattgatgggctctttgggggaaatgaatagggataggcctctaagtggccttttaaaaaatggtctaagccaacatttttatctgagtgaataagatgaataaatagaatttatgtatatcatatttttcaagggattcaaagctgggaagaataaataatatgttaggggactaaatcaagctcaaaaaccatcattttaatcagaaacatttggtcagtaccaaaaaatgagtggtgggtatgtcagaagtctacatttggatctcggaagtgacagtaagataatgcaaataacatctgtttctgtatagatatgtgcatatatatatatatgaaacattctgattaacagtatgaatttttaaaaaattaaaatagtttctaaccattagaggtagattttaggtcctgaaagcattcagacttttaactactagggaattgggagatccatttggtggccacacttccccaaagcagaggtcacaattctgggcaggtgtctttttaaagctggcatttgtctgtcagtttgcagagccccctcccccacctggctggccctgttcactgtaagctctcagtgttgcctgccagcactgtgtggcccttttcatggtggccagtgagtggaagaggaaatgctagggagcttctgcccaggccattaaagacccagagaacagaaagaaagcaggtacctcacccactcatgagttttcaatggaaagatggcttttaatctaaaaataactaaagaacaggtgctaacccttattgagatgggtgaataaaatgtagtctatccaggtttacggaaaaacagcatctatgtcaaggaatcttttcatatttagtccgcgtgacctgcttctgatcatctatcagctgtctgtccccagggccccaagcacaggcacccgcctttgttcctgtttaaatagtgttttccaaagtaagttctacggagacaatgttctgctgagcttgtgaaatggtgggctagctaaaagtggctccaggtcagtttgctggttcagacccaacccatctgaaaccgtaacaccacacattgtttccaagtatttaagtttgccagccatcacttggcagtttcatcagaatgttcagtctgagtaactagcatcaaaggctgcttctctgacttagctggaccaccctacccaggtacatctgctgttatctctcctttgacactgcctttgagttcttaacatcttctctatttacaccttgatcccctagataatattttcaaacttttatctactaagaaaatgactttaagctacaaaaaaaaaaaaaaaaaaaaaaaaagactaaaaataagccaggcatggtggtgcttgcctgtaatcgcagcactgggaagatggagttgtcagaaactcaaggtcagtcttggctattttgcaggttcaaaaccagcctctgctatgtgggactctgtcagataaagaaagaaagaaacccagctaaccagatgtattgtattttctccaaccctcaccacacttaacattaaaaataatgtaaagcctcggaacattaaatgacatactgaagatttgttcttgttctcagggctgtagctagcttcccctgtttctggctgtggaaggtagaggcttgcttctctcattcaccattgagatcttgaatgtagaattctcaactcaaagtcattttcaataacaggcacaaagacctgttgccaggctcctgagagcgtctcaggagcctgttgcatccatgcctttggtctccccactttgtccttttgtaagcactctggcatggctctttgatgtgtttaggactagccatttttccccttccattcatgcaaggccatttcattttaaagtctcttgtcttcctattacttctttaaaatttgactattttttcttttagttgcctctgtttttctgaagatactctagtcatatattaagctatgtttctatgtcttgtccctcttgctttgtgttctagagattatcttggactttatcttccaggtcactaattgattttcatattttatcaaatttatttttttaatttataagaatacagtcttgatctttgatgggcagctcccttttcttactcttgtgaattcttcatcttggaaacctaggtctttttaacaaattttcttccatgttctagatgaccttagtttcttcaagctcagtattttctctgttttttttttcttattgattttttcttgaattttggatatttcttggttgcttatattttaaaacaactttattggtataaatcacatactacgtaatccctccatgcaaataacagcccagtaatcctctcaaacacaagctcctcccacccctaccctaagcaataactgcacctttatatttgaaataaagggttagaaaacctggcttatgcctctaggctttcagaatggaagtcaggggtggggaaagaaggaaaaccagaggtgaggatcaggaccacagagagttcagagaggaactaggacagcagttggctgtcttgctgctctgtgctgagctggttcactttgtgcccagggttagagaacagtccattgtaggtaatgatgaatctttcctgtttgcagctgtctcctgcaggagtgacctggcacacaggtatcatgaattggtagattcagtgcacacagtaggtttgcactggtaggttcagtgtcatgcacttagatgcttcatacacacttatcttatttgaacacttggatgaggctgttttgctactgtgtgtctgtcaacactatttccctaaagaagactgatagcattacttttaacagtgttaggcaccagaagatcagaacctaggtctacccttctgcatgcaacacacgtgatttatttccatttagagctgaaatctgtggctcagagagctgaattccttacccgaggccacacacgaagtaaggggcgaaatatttcacacttgaaacattcttccgatcacctgtccgtcaagatgacaggcacttcaagcatactagacctactgtgagtcagcatacacccaaactggcctccataagcccccactctaactcgagggccacagtgtttcttggtgtcccccagaatcagcatcagttcagatccagtatccaaaaggctgagcaacgctttggaggaggactggaaaaaggctaacagtaaaacttttaggcattttaccaaaccctttcctcaggagaactgggccattcaaggggttctgggtctgcaaactggttcagatttagaaattggttcacacaccaagattcccatttgccatgatccgatgtagccttttttccacctgtttgagaatttctctgtgtatacagaccaaacaaaaatgcaatagtttttttttttcttttttgtttgtttgtttgattagacagcaccaaaggtccatacaagtcacaccacctaaaaatcgctctgcctctgctgtccattatgggtcatgccattatggacactgctttctctgtgttgcccattacaatagcttgcctttggccattccgtgctgcctgccacctggcccctgctattttggaacccaactgaagacattgcatttaagtcatccaactgagctgctgcctctccaacctaagggctggcacaagggaaggggcgacaagactcttcaagtgtgctgatgtttctcccatcgttttgtgttttacaggattagtgaagggcatgtcttctgggctctcccattgtgtaggatcaggttttgcaacagagtatccactctagcactgcaatttccctgagcctttaaaaatcccttcatgaacactgagccaaggcacatctggcatcatcaactctttttcagtaggctgtcttttgacaaatgcttcagccaatccttcaaagaaacttttgacacctttttaactgtgcgatgttccatagtaaaccatagtccacccttctgcatacaacagatgtgatttgtttctattgagagctgaaatctgtggctcagagagctgaatgccttacccaaggccacatacctagtaaggggtgaaatatttcacacttgaaacattcttcccactgcctgtccttcaagatgacaggcagcttcagggggatacctgcgcccaagcactggaaacggggctttcttctctggtgttgccgtaggtggcgggagactgcctctctgcccaagaggaactgagccaagaaatctgcatgctctccccatcctcacacatctgggtttcagctatgaaatggttttctccgagcaagagaaattccgaatcctttctactgggtttttcaaggagactcttcatctcgtgttgtttcgttgactttaaataaaatgtaagatctgtgggtactgaagaaaagttggagatcatacttcccactgccagctaattcggtgcagctcccaggtgggaaaatcaatatctgccttgcagaggtgaatagtgcgtgccattgtgtcaagccgcagaatctttcttcccaggaaattaactggccctccatgcttttcagctcttcaatgcagggtatttcatgcttgcctttgttcagacacactgcatgtgttttgagtggaaatctgagctggtggtgcctgaggagatggtttctgtctgttagatggctaggctgcattatcctgcactaacagaaatctgcaggcatctccaggctgagttgccactgtgctggtggagaaatgggctctagggggctctgcaccactgagacccttcctctgatgtatgtcactctaggctggtaatagtgatagactgagaggttagcaggtgtgatggcatacatctcgggtcccagcacccaggagggaaggtggaggcaggaggactgcaagttccaggtcgtcctgtgctgtctaatgaattcctgtggagagatagaagaatttaatgcagaggttgctgaagtgaccttttatccccactcctcctgcatacctttgtctccacccttcccaggaccaagatcctccagaagttctggtaaggatcccagctcactacagcactggaatatttgcttcccagttggtgaacagtcattggccccacccctctacacagccatgccggaatttctcacaatccaagaaccaagtctccttgtactacaggacttcatgtccattgctgctctcattgatcatgactattctttaaatggcctgctgaataagtcttcctatgttagcatatgtgtattcgtgcacatgtattgtgctaggaacagaacccagggcctcacatgtaccctgtaccactgggctacacctccagttactatggagtattcaatgtatggttattaaaatagtaattagattttaggccatttgaaaaatcgctgcccttactgaactctgactgcttgggcctgtgggatggacagtcccttctgacatcctggttccttggcagatcaactgcagaggttattaaatacctttgcctggctgagggttttcaacactggtgatagcagaagatccagaataaggttctggaaccacctgaaatccatattaacacatccttgtgatggtagtgccagtccctggctgggatcaagctagcactgagttcctcttcctctgccacttaaggatgtatgcctacacaaggcatctgtcagccgtttggaagggttaggtcagtatgctgatcagaaacaggcccttgtgacgtgtccagcagcagttggaacctgagaccatgacaacacatttgtgtcttaggtggctgttagctgagcctgagatcaccctcccctctcagaaagttgtcgttcagaaagaatgatcttcatagtggccccaaaccctgtagtgtgaccatggctagtccaggagcacaggactgtgggtgggatttatcaagacctcagaatccaactttatttgaagtcagagtctcctcagctttttcagtcaggctgtcatggactcagttggctctcacctctattctatctcacccaccttaatcacctgcctctgtatctagtccaaacaaagttatctgcctattatggccacagaagtatataaaactagccaagatgtatagatctgtttttaacttagcaaaaccgttggtttggaaacagccctgggaagcgataccctgcataatggctaatgtctggtaggagttaggacccttgtatctggaaggaaacctgatccatcatctagaaggaggatcaaaccattgaaaggggctttactgggccaccctgggcccacctgtggctatgggcagtcaacaaggcagacgaagcagcatgaagaatataggtctgtcactgttcccaaggttagttggtgacccgagttcaatggtgctgatactatgcaagtctggaatgaacttggttagagacatgccccaccttctttttctgtcttctctgtttgtatttcttccctcccatgtagctgtttctctagctactgtatggataagtcttgctcttttctccctggggatcttcctaaagcacactctagggtcctctagtccactggctcttctgactgccactactgcttcagcctgccttttgaggacatctctattataagaatgggaggtgcttgaggccaaaatgtgaaagctctggctgtcaaaatctgtgtgccaaacattagcattgcagtaatctgctggtgcccagaaggtaagccctctgaagccatccacctgctagggcttaaactcacctgggttttgattctcctgccttttcgtcctttcagagagtagcaaagggggtgtggtttctcacccctattctgtctattggaactttagtctatttaagttttggtctcataagctttgttgacatcttttgtttgctttgttttggttttctaccatgcagggctgggtctatagcccagtgctagacctcagctcttgcctggcatgcaggaagtcctgggattttccattcctggcacggggaggttgaggggggttatcccatgccagtcttcatttgctatgaaacaacagatgaatagctgtcctcatttatctctgctcaccttatcttataattgcaaaggcccacattcctataatggggagtttccccagagaccccctgtgtgagctgtttatttgatggatggcttgtacacctgtgtgtacatgctgcatgcctaatgttgtcatttactgggaaaacataagcccgtgtcctaaaagaccttgtcaggagctgaggcagagcctgctttgaacagcattgggtttactccttggctcttgtgctcatgggctctggaatgaagattactaagtatgctgctatggtctgaagacaacatttgtcccatcagggctacccaggactgtgaactgaggctacctaggacatctgtcataactgggttcctacctttgcagcaatcctcagaggtggccaaagatgctgaagtccactcttctagcatccagctgagtctcgatacttaacaagatagggaagttggtgagaggctatgtgtagcccatccctattcacagtgcttttcatgtgaccttgagcagggaaggggtcattgtttcagggcccgggtgcccatctagaccagtcatttctcaacatgtctccaaggaacaactactccataggaccctgagaaagtccatccatctacagctcgtgtatatgaaaggccaaataaatccatttggattcatcagacagtggctaacaatgccagaggttctgaagagcagcctttgggcaaatagaccagtcagtcagtagaagagaggccctggctcagtaacttctcaattctcagttccccagatgaagttaataagttttaatgaagcgaagagctgtcaagggagaagggctgtatgatcaaattagcttgtggaatagttagtgttttcaactagatggcagacacagtgtggagatagggtgagcgtggagattgaggttcgggtggtaggatcctagaagtgacctccaacccatccagcagccctgatcaaaatgaacctgcctggcaccatgccgaggcaggggcatgtcagatgcaaggagcctgtccttacctgcacaagaggtggggacttcaccagtcttcatgagtatctctacctattgccgagatggcgcctggatgagtccttacaataaggagcccaccactttgagctttaggttgaagtgaacctttcactgactcataaagtatcttttagaacattctcaaaataaaataaagactgctgcaccttgcagtacggaaactggcaagctccacctcacccttggaactgggctagcttcatcaggtcatgaggagggtgtacattccctctgttcagatgcaatgagaagagcactatttggccttaagagagcaagaggtgaactaaggttggaagttgttgtgtggagcagccaaccactgccctgaaagctgtcagggaaagactgagaaatgccaatggccagtggaagctggggagacaggatgagtaatatggactccaggacgggaagactgcactggtggaaaattcccaagggtctagagttaattaacaacagtgttccaacattagtttcctagctttggcaagtgctgcttggtagtgtgagatattaatgacaggaacccaaggaagagactcatggggactctcagggccaccttcttaacagtctgttaatcaaccatccctacaaaacaaaatgcctatcctctaaaaggtcatgtgtcagcaatatgaaggttagttttctgtcacatgcaggaagtggttgaaggcaatggaggtcaccgggtctctaagaatcagaagcctcagtgtcaccaacagggagttcaagggtccaggaaagctcgctgctccctgtgaagatctctattagttattcagcttccaatggaggaaaggcttgttttaactagtgtctttggaggtttcagtgaatggttttgtgaccctgttgctacggcaacatggtatgtcatgatgtgatcatgtggtaaaagaggccttttcacttcgaggctgttgagatgcaaaacgtgagaaaagaaggcaatatccctttcataggcatacccccagtgacccgacttctgcacgctaggcccaatatcctaaaagttcaccacatcccgacagtaccacaggccagcgaccatgctgttaactcattagattagggtgacctgatgaccaacactacagcactcaatcaccatgagtctgtctgtaggaactcccagctaacacgtaagcaaagtcagtatgccttgagcatccctcatacagaatgctctaaacaccaaaggctctattagagttcagataatgatgctacctgccacgtagaaagtgccatactgagaaacttgctttctcatataaaattatttagggcatctataatgtgatcttcagactgtgttacaaggtatatatttgttagactttagttctaatcccaacatcactcattatgtatgtgcaactgttccaaaatctgaaagtatccaaaattaatattatttagagcatctcatcaaagtccaactggtgagtgagttttacttgaatttcttatgtaagtataggtgagaggctacaggagtagaaaggatttgaagacagctgtatcaccaaaagtccactgtagcgtggtgatggctcaggagagctacaaccctggagcacactgtgctatctgcaacagtttggaggggtctcttccaggcagattatgagctctttgggcaactcagcttgtctgagaatgactctcagcagtcctcgtgtgtgtgtgtgtgtgtgtgtgtgtgtgtgtgtgtgtgtgtgtgtgtgtgtgtgtagggaggggcctagtgaatctgctcaatctcagggacttcctgaagacttgtgttgtttacttcctgagcttaatgagcttgcctgcagccctgtgttacaatggaatgctttacctcttcagaatgtcctgtgtcttaatcagaatcgtccctccgagatgaagggttttctctcagaggaaatagcaacacatcaacaccccaatatagacatgtaattaaaaaaaataaaactatgtcttgtaaccagttgctcaactcccaccaaaaaagatgtctctgttattacaaacatgaggagtttatagctgagatttcttagaatcctagaaatgagactggaatggaacccattttactatggtaaacttcccacggaagcctggagttctacagaacgcactttgctgaagggtaccccattctgttttctggaggatagttcttcaatctgaatctttctaagagttcagctgttggtctgaaaggagtgtattgcacagctgtattatgtagagtttctgagtgtgcagttgctcctctgttggtgacccctgcagagtgtggcctaagggccttcaagtgataacctgaaccagagacctggttagaagtggcagatcccttaagaacacatgtgggaagggttccccagatttgccctttattagaaagtaaaactgaaaagtgaggatgtgggtgtggtgggcagaagcccccctcctccaggaacctggtacctgtcaccaagagaaagatcaaagcccacttggtacgttggctggatagattgaagcaaagtttccatttcagagctccttggttgtgagccacaactcatctcatgcccttgcctaccccttctggccactacaggctcaggaccattttagccacagccagtttgatggcgatggcccacagtggcacctgtgccctggccagagatgagttaaactgtcatttcagcagttgccatcacatggggttttattaatgccatcccctgctccagacgtgaccttcaatcactgggcaacaagaaaacattgaaaccaacttcaactaaatgaaaaatactgtgcagagaactcagtctaaacgtcgccacctttggatgagtgatgcaagaaagcaggctgcctggcaggtacatttccagctgatggaaacttcaggctgctaatggctcttctgggacacggatgtgagggcagagctggctcctagtatattggagtaactaatgagggagaaattactcaagcatgtgtctaaaatatccagggacatagggtctgggaagacccatagcactgaccagacttcctagccaagggctagctccttctcatgggtacagacgaggagagccacttaatctcttaactgtacacatgccacggctagccttctatcgccacgaacagaaaagctacatgttaactaatgcatcatgtggggtccttggtgtgtttccactgtgaagggcaatcatatgttagccctgacactcctccatgcagagtattttcaaagttcagccctgctgtgacatacatcagtattttgtattgccaaatcatatataaggcagtggcctgtcgctgtaggaaaacagtaactaagggtgggtggtccctcttgtaatgttaatagagtgtgtcactcacacaaaagtatgcagccaggcttctagagttcaagtgttatttacttgggataagctcaagtttggttaagaggcctgtggagtggatggggttattaattctgttatgtgtaatgagacaaaaagaaagtttgcgatttgagaagccagcccgggaactgagagcctacccaccaagccaagcatctatatcttgctctaatacaacatctgaaatgtgatacagacattgctataaagaaggaagaaatacctgcctgctatccttccatatcttgaatgccctccccacatcatcagcctggagcagtgttgggaggcagtggagcctttaacagatgggtcatgtggaggaagttagatagtttgtgttgatgagactgtggactgagacctccaaaactgggagccatttcctccttttgagttggttatctcagttggtttcatcacagtgttagatgctgtctcttctggtttaggttaagtgttctagttaccaaatgagatgttactgaatctgtattagctcttgtcactcttttgaattattgtgttattgatggctatcatgttatttgggaaaaaatatgttttctctaagcttcgtaccttgtatagggcagtgtttgttgatcattctctgtgacaaatcgtgtggtccagaaagttccccagagaagccttctgtatagactggtggaagataaacaagttgtggcatttgctttgcacactcattgccgcggaggacatctttctccagctctcagcatgttttcatagtagactgtgcattttgacaggtttattgagaggcagctgatgcaccatataatttacccactttcagtatacaactcaatgggctatgatgtgtttacagagttctgaaagcatctctacaattttagaacattttcatcacttctaagcaacccgtactcattagtcacacccaatctccccagttccccagtcactggctaatctataatccactttctgtttttctagatttttcttttgcagacgttttatataaatttatcaatatactaggtaacctttagactaaactctttctattcagcctatttttaaagttcatctatattgtaacatatatcggtactctgtagtgccaaattatatttcattttatagatacaccaccttttattgatccatatagcaaatgataatcctttggattcttttcccttttgggcaaagaatattgttgctatgaatttgtgcttaagttcttggaaagaaatatgcttgattgttcttggatgtgtatttaggggtaaactacttgatcacttggtaacttctgtttaacattctgaagaactgctaagctgttttgaaaatgtgtatacaatgtcacatttctatcgataacatgtgacgtttataattgctgcatatcctcacttccttgctatttttgtccaggcattgtctgcatgtgtgtgcacacgtgtgagcatgtgagtgtgcagttatgctcacctgtgactgtgtgtatatggggagtctgaagttgatattatgagtcttcctctatcactgttcaccttacttttggggacagagtcgcttactgaacctggagctcgctgattggttaggctagctggatagagagctcagattgcctggccccctcaccccccagtttgcaggtgacaccaccacacccaagtgcaggggatctgagtttaggtcttcttactagagcctgccctcgcctgtctggattctaaccatccctctgagaatgcacccgtatcacagtgtgattctcatctgcgtttttcctgttgggcaatgctaccaacatctattcacgtgcttagtgggccacttgtatgtgttctttaaagaaatgtctattccgatccttggcccacattttagttgcattgtttgtctctacattattgagttgtaatggttcttagtttattttattggctcattgattcttgagacaaggttttcactttgtagcccagactggcaatcttcctgccatggcctcctgaatgctgggattacagatgtgcaacacatgcctggcttagtaattttttgtgtgtttcgaagacaaagtcttttaccacatatgttacctgcaagtcttttcttccattctctgtgttattattttggcttttttaagtgtatattttttttaatttcaatgatgtcaaatttatgggggttttgttattgttgatgcttatgcttcttggcatcgtatctaagaaaccaccagctcaacaaaaacatcaagagccactcttgcttttgctctagcatttaggcatttgactcattttgtgttaatccacatgtataaaaacatgcatgggccagccccattccacgtggatactaaactattattcatcaccctttgggagagggagaaatgggtacccattttgcagttcatttggctgacaggagcttacctttccacacagctgcagcctgtagctggaagtaggtatcaggtgagcacagaggctaccgtcacttccgtctctgaagccagcctagctgggatgctctgctctcccaacagcctctgagtgctgaatgctgcccccttcagcacagctgagcatgcacaggctgatctgctattcaggtgtaggagtcctgacagcaccctccccttttatagcatagcagccttggggggtgcttagcttctctgggtgttcttttctcatcttaatgataaatgctttgcaaggtcattcaggagtaaatgggatatcataaatggctcacacagtgctggagcctgaggcctagcaggtattccataaatgacaattgccattattcccttgacactccctcacatgcctggcctctgagccagttgtctcatccctggaatacaaactttagcagagcgagaatgcccctgggtttgtttaatccagcacccatagggcccagaatagtgctcaatacacaagaagctcttggtaaatgtttgttgatttgttaagtatatacttccaatacttaagtctaatgataaggataaacatttttgaagcaatgtatccagacagctgtggtgacccatactggtgagatggagtcaggaggatcgggagtcaggagtttgaggtcagcctgggctatactatatacctatatctatatctatatgattgaaataaaataaaattattttataataaactatgaaataaccatagaaataacttcctttgtttttaagggagatgtgaactgatgtaacaagacagcaaacttgcaaatgaggtgaatatatattctctggaaggtgtgatttcattttcagaatcctaaagaaccagtgatcctttaataaagctaatttattaaagaattcagaggtcataaaagttaatgcccctcttcaggtttcacactttcctggggagagaacagccttctccatgacccttgttaggagcagctatattgaggccgaaggagggaagctagagacacacagagacagcctgccttgcagatgcttaatatctgggtaaggagtggaagttgctccaccatctattcatgtatttctgttcagtattcctttccatctccccctgccccagtactttcttagcaccttaaaatgagtgaatatccactttaatccctccttattgtatctgcccacttggggcgttagatcacaagcctgatagtgacaaaccccgagaaattctgagttggtttcttatagtcaggaggcaagtataacatgaataataaaaaacccagaggctgatattggggttcaagcttcaagctgaagatcagagaagcaaagcagccaagctagtagatcttccctgtatccagctgaaatggccatcctgtctccatgaatcctcagaggcaaaagctctgaattcccatctcatcctccttatattcctgtttccatccagccattatcttcctgtctccacctccctagtgctgggattaaaggtgtgtgatcccaattgctgggatcaaaggcatgagctctgttactcttcactcttgtataggccagggtggccttaaactcagagatccatctgcctgtctcctgggtcctgggattataggtgtgtgccaccacagcccagcttctacagctaacttgtgggctttgctttctgatacttcaggcgatctttattaaatcataaataatatatcactacaagcaggagaggaccaaccagtgacaaaagcctgggttctatgactttattcttcattaattagttctgtaaccagacaagttccttcatatctctggatcagttctaacctgggaatgtgtgttttgaattttttgggcctatccagctctcagattcctgtggcatatccagtcacagagtttttcaagtgactgtcacatctctagatgctgttaagacatgtggtatggagaatagcacaagcccctccctggagatttacaggcatggtgtatggtaccccccaggagcttatgtgtctagctgcacttgaccatacagaaccagggagagggtgagtttaggaatgtctgtgagaggctcagacacacctgggagaaggaaatatggagctgagcccatggaaagcctggtgttttgatgggtaagagatcacatgcacatgttacttagaaagaacaaggcagagagcatcctgggcgaggagttgtgatttcagggctcgccccagaactgccacttaccggtggcacaggtgtggtgtcacatatctgttcctgcctcagtattcttctctatatattcttctctgtaggtcagtcattcaaccctaggggcacgggaaggtggtgaaggctaatgatggccaacagagttgcagaggtccttcttgctggactttgaagttctgtgacttgaacatgccatgcagtttccctgggacttgttttttgtttttgttttgttttgttttttccgttggtggatgacagaaatgaccttgaagggttgctgtgaagatctagtgagagactcaggcctacagtgtggggctcagcagtgtgaccttctcagcatcaaagctattctggaatgaagtttagtgagtgggtagctctgaggaatcagattcatgagatctggaattgagaaatcccagtagagcactatctatccagccttgaaaagaaggaaagcctgtcacatactatgacagcgggcgaccctgaagacactgcatggagttgaatcagccgctcacataagggtaaatgctatgtgattttcctcccgtgagcagtcaagcttgtgggctagaaagggtaggagactatgggaagctgggagaagagtggagaatggttcccccacagagtatcggttttgcaagatggagacatcctggactcctgtctcacagctctgaatctgctacagattgatagaccgagcatttaaaactggcagagcaagcgcaatgcatattctttcatttttatgtaacaaatattgaagttaacacaatacataaggtgttgtgcaaggtgttaaattgggaccagagatacaaagatgacaagggcagaggaaagctctgtttctagggagtggagaaattagcagagttcttctagagagacataaatgtaccatcgctgcggcggtggcctaggacaagcttctgggcacttaaaccatgatttctatagatttaagacaggaataactaatccctgtgtctaggtgtgttgtaggaatgaaaggaaagtgggtttagagtggtaggcagatactcactgcaccagccgtgtttcttaccacggtaaccagacacctggcaagaaacaacttaagggtggaagggtctattctggctcatggatacagtatgttctggagggaaaggcatggcagtaggagcatcaggaactggtcacaatgcgtgtacagtagggaggcagcaagggagaaatgctgtcatgctgctggtttccttctttaacttttttgtttagtccaggacacctgtctatgacatctgccagcattcaatgtggtccttctctcctaagttaaacccctcaagaaatgctctcataaacgtgcctgaggagtgtcctaagtgactccaaatccagtaaggttgatgttgaaggttaacctagcctaacacactcagtgatgttttccctcaaagggattttttttttaatcacacaggagaggaaaggaaaagatgcagctacaacaaacatcacaagccataggaaaagtggaatgcaggaggggcagggttgtgcggggagggccagggttggcctgagcctgccttggtggccctaacctgtctaaagacagagaagcaggacagacaaaggagtcacccagagagcgcatcctagtgacttcccagttgtcagcaactccttccagatctaaaaggcaggaaggacagagggtgtcttgagccacagccttccagctgtgagtcactggggaagcttgttggcagctcctgtcagattccaatatgggagaaatgggaaatggattgcaccccaagagggcctgctagcagaaggcctatctgtctgacggcatggctggctaggtggttttatggggcctttccagggtggccatgtaaattcctgctgagccctgtgtggtcttcattttcacagtcagttcagttaggctgggtttgctgaggagagcaaggcagttgtttcatttgtctttacttccatccagcaattatatgttacaataaatctttccgccaaaagctgcgagccccaccgccacgtgcgtgctctacaccagcctcccacctgagttagggcccaaattaatacacagaaacttgtgttaggttcaaatgctgcttggccaatgactaggattctcatctgctagctcagtcttaattatcataaatctatatattttataagacttatcttatcagacgccttattggcatccctccttgttggtggatcacattgtgccactggaggagttgaaggggaaaagggaccacttcctgtttgtccttacttaaatatgagtctccttgctatgtcacttcctgcctggatcactacttctctactacatttcccagaatcctctttgactcctagtcctgtctaacttgctgtctcattggccaaacagtactttattcaataatcaataagatgaacatacacagtgcattccccatcaaatatacccaacctttgccaggagcataaatggtaacttattttgatcaactgcctactgagggatgccaggtggcttcaaggcaatgtctccatgccaggcatatgcaaagcacccatatctgccttcacttaccatggcatgcattgctagaagatatgggccctggagctcctggacactgcttatgagctggcagtgattgaaaggggcgtaatctaccaggctccgaaccctgagtggaggaggaagctgatgttcagttaaaaataagaaagtggctgagcatgttggatccctgagtataaagagctggggtctgctgtcaccttgtccgcagtgtgccctcacattgtgattatttcctggcagtctcctgctctcccttgtatagtcagcttgaggaagtggaatctgggatccttgccaccctatagtacctggtggcctgccaggactttggatacagtgcagttttatcctggagcaaatttggtaccaacccaggaaattctttccaattttctttctccacttgtcgtttttgccattctgcctgtccatccatcaaaagagaggagagcaggaacccatgtctcacaggctgtcctgaaggtcagccagaaacttcagtgaatgacataatggggtgggaggaaagagagaatccaaaaggtagaagttgactagtgagagcttcttgaatgaacatctatgaaaaccatccatatggctgaatttgatgagtcctgctgggatggttcacaagtgtgggagctttgccaggacaaaacagttggcccatgagattgcaggggctttaaagggtacaagatctcctttcccttatccatgtgcttctttgggctttgatgcctagagccttcagaaaaatatgtgagtgtgtgtgtgagtgtatgtgtacacacgtgtgtgtgtgtgtgtgtgtgtgtgtgtgtgtgtgtgtgtgtgtgttagagagaaaatgaaaaaacttaggataagaacagataaaaaagagaaattgattttgaaatactcctaaaaatgatggaagagtattgtatctgttttctgtggctgcaacaaaatactcaagactagataatttataaaagaaaaaaatgtttctttggccttgtagctctaggccagaaatcccataaacatggcccacagagggcttcctgctgctttatcaggaccccgaggaagaagcagattctgcatatagctttcctgtaaccgctcatctagagatgatgaatcctgcaagagaggcaagaacccattttggagtgctccattttccctcccattttgctgcagagtctgacaagtggatgtctgggatacatactcacaccccagcagagagcaggagaatgtaagccggaccctctactgtagctcttctgattgtgttccctcctgtacatctctgtccagccctattccgctgaagccaggggcctctgtcagtcgtattttacaacaaagagctgagctgtctggtcagctcatgagcctgggtgatggcagacagaaagtgtaataattcggaagccagaggctgggagcccttcagtgacagtgtctgcatcctttgccttgccttcctgtgctgctggaaaaggagcaggagagtgtctccccctccctagttctattaatgctcacctggacttggcctggcactggtagatttgaagagttgttttgacaggaagctctatactgcatgtgtagcagtgtcttaggttgtagagttaagagacgctgagagtgccaagcacagagtgagccaatggagagcagggctgggcccacggtagacagtggtcagtgagatcacctcagaaaatggttggggagtccctgtcctcagccacagagcggccccagaatgcaaagggtgctgcacagccacagtggcagcagggaccagagctgagctccttggtcccagaccccagccaggtggagccttcctacacggaggaggaggaggacatcagtagtagcttggattgcccatgtatggctcttccagtggcccagatgagtgttgctgtgtttcagtctttgtgttctgaaatgcattagcatcaggcttagcggacctagagttgaaagacagccccatgctcctgaatgccggaacactgccattgtctgggttggtgttggggagaggggactgttaaggggttggttcctggtgaagagggtggccccacagcatcactggcccctgtgaccacaagccttcagtcagtcccacgagcagaagcagctcacagactcagggccacagaactgtggaatgaaaaaagctgtacaaagcttctaatccgttctcaggattttctggttgggaagaagggtctacagagcgaacgtgtcttgttcacatgtaactgatctgcgtggcctgctgccagagtgtacagtgggctgactcgtgctagaggtcaagccaggctcaagccactgaaaataattatcacccacttccactgagacattcgataccctgtcaatggaaggcccattttgaaacaagccaagcaaagaggcagcagcctattccaaggggaccttgtaggaaaacccatgcctgctgcttcccagctgaaagatctcaggcagtgtacataacctcttagaaggtcagcttccaacgtttgtaaaatgaaggagttcatcagcaaaactgatgggacaataccttggagcccctggagagcacatctctgaatatttagtgttcaggaggcaaggttgttagtctctagtgctgagaaatgtgcacaccctttgctgatttctgtttggaagaaaaacgtgtcctccaagtgtaaggtttgttgtgtgcctggtagagagagaggctggaaatgtcaactggggtttgaaaaggcaacagccacattgtgtcattaactgcccagaaaacttctgataaggtgctttccacattctggaactcccagctcctttaaaaaataaataacattaaaatatagtgttaagaagcccaagacttccggcatttccaatctgtctgggagtgcagatactaaaagcataacagatatttaatggaatctgtctttttgatgataattacagcattctgaagtaggctttaaacacatctggatacgcaaactgctacttggaaattgcttgcttcaagggggcattcggtatctcaccaaactttcaagttagataactactgtttaaattgatggcaggtgtttgatctataaataagagttgtactttgcactgcggggctctgtttacctgctgcaatgttcatttgcaacacaccaggaactggaaaggccagaggcatgtgcatcagtggtacccagagtgtgtcagctgagatgatgcttccacaactccgcattctgtgaggaacacattctttgggagaagagaggatctgttggattggaaggttagccagtgggcctgaggagaggtgagaagatcacacagaggcataataagttggcccagaacatccagtagcccctgagaaagatcttccctaggggctggggagacggctccatggataaagttcttcaccatgcaagcatgaaaacatgagctcagtccacagaacccacatgaaaactgtacagactgtacacagtggcctgtgcctgtgatgccagcctgggggaggcagaggcatgaggatccctggggtttattggccatctggtcttgccaaattggctaactccaggttcagtgagagaccccgtcttaaaatacaaagtggacagcaactggggaagatgccaacctctggcctccacatgtgcacatgcatacatgtgcacaggcaaacacacacgtgcacacgcgcacgcgcacacacacagaggggcatcttttgttattgtctgttgttcttcctcctcttccccttccaccttagcatgtatttcctggtctctgggcctaccctggctttatcaacctcatttctttgcagtatggtggtacccacaaatgtcagttttcccttgaggagggctttcaaaacgggccctttccccgagactcctagctcactcctgatgttcaaggtacagcattttaatgccgttccaggccatatatagcctggacatgcacactgcccggggctttcccttttctaatctctcacaccgaaaactacagctctggcccatcacttcaaaacagagagcctgcagcagctccttcccaagggatactgggattccagagtcactcccaccactagctcagaagcagaggccatggcaaaatggagctttgggtgaacatggcagtgcagtcagtgctctcacactggcttccagactgctcagattacagtcttattagcacctgtcccttctctccagggacccttgcttatatagagagaactgaacaaactgtggaatggatacctgactccaggacatcacagtcacaggagaacattccccagggagaggctgtcagcatcggtcattatgcggccagcaggcctcaaagacacagagctctctccatcccccaggtctgtcttctaggacagctcaactcacttattgggtgagcagcctcagtgtggaacccagcagggagacaaacactccaggctgacccagcacaggggctgtgctgtcttaggatgaactcatagtatcataccaagaaagtcagggcaaccgaggggatggtacatcggagaaatcagtttctatagtgaaatgggtgggatcgagaaggatgctctcagccagtgagatggctgatgacctttgtttgacccaacaccgatgcaaacaaaggagagaactgacttccacgtattgtcctctgacctccacatgtgtgaagtagcacctacgtgcatacattccctgaatgtttaccctctgaggcctgtgtgagtgagcaccaggggcaagtcctaccccagagctgtgtgctaattggagagagccattcatggtgaatgaaaactgtgcaggtgtgcctacatgttcacaaataggaacttactgagaacatggagaaacctttgtccagccgtcccctcctcactgcagtcttcagagagcagtgtagctcagggactgccactctgctgagtcctctgtggctgagtcctcctcagtatcccccggcccccacttgccccagtcacacacagcttggttggtatatgattgtcttttgagtctcatgtcccgctattacaggtggttagggtctgccaggtgttttcaggttcttgatgtctttatttgatgaaataaaagatgcacacagattgtaaagtacccggataccttaataaaagccaagcaatagtacagatcagaaagatatattctgtcaagagtgacagtgggccacatgactgaagatactaagagccctgactattgtttgggtctttcttttatggggttcaatggatgcagaaatttgtttgctgaggggtttagtgaggacagttcttttattttgattgataagagtggcatcttcccttagtgcatctgattttaatcataggcacatccaactatgcataggtataaggtggctaataggggagtctctctgaaaactcacccagaggacacagtttgtctatattgagcaagcacttaaagtcagtctaggctggattggttcattacccatagttctcagactgtgttccaggatattattaatggattgctaagaggagcgaccgtgtttaaagtaggtgcaattacagcctgcaggtggtgttcctaggttgctaacaggttgctaggtacactgggagaggagaatgccgatagcccaaacccatgcttacctgcttcactgctaccacaagcttgagtcctttccctttaggcaatttaggaaaatatttcctaacactgctccctttttctcttaactgagttgttttggggggtcctgtggaactagccagccacccctgaaaccagcagcaggtaccttgagaagggcacgctccatataaagttagacctcttcccttcccctctgtgaacccgtgatgaagaaagggcctgtgctgccctcttataggttgggccctcaagctggggcagaaatcgctggtccctgaggcagacagatgtagatccccagaggcttgatagacacagccagggtccccggagaagaggaaacttccattgagaaaatcctccaccagacttgcatacaggcaatcctgtgaagccatttcttcattaattatcagtgtgggagggccaatccctctgtgggaagtaccaaccccaccatgggatgtaccacacccaggcaagtggtcctgcattgtgtatgaatgagcagactaagcaagccaggaggggcaagccagtaagcagcactcctccatgttctcagttcctgtttcctggttcctgccttgagtctgtgccctgacttcccttgatgatggactgtgatggaacgtgtaagccaaacaccttcctccccaagttgcttttggtcacggtgcctttctgacagtaatagaagcctaactaagccgcagcctgtgtgtcactgtggaggcagggagaagggaaagatgtgtgtggttgggggagtgacctacacagatttttcttctcctcctgtttccaggcagatgaacttgtgtttcccacatggtcgctagtaacaaggtccacacttggggtctgtttgagagtagtgaacagcaggcatctgaggcggcacagagtccccagttacttgcagaccacaggaaaagtttcatttctaccaagacggacttttaaaatcataacctgattagttcctatctacatacaagtatgaaatggggtaggacagtatcccaaggagagactggacatacttcaatgtgcatgcatacacacgtgtgtatacacacacacatacgcacatgtgtacacacacacacacacacatacacacacacacacacacacacacacacacacacaaaggtcaaaaaccttagcaaagttgaaggctactatatactcaaggagggagagcatgtttagccaatacccttcaccaccccacatacacacctgctgcttcccaaggcagctggctctctgacaaagtgacagtgtttcaaagctaaagttgcatccttagagatcatcatcaaggcctgctcatttctgattttgttagagattttggtggccatgctaccctcttctcttttcctctagtgcaggtgggggacatgggtttgtgtgtgcacattgagggcttgttgctgctgctctctctctctctctctctctctctctctctctctctctctctctctctgtgtgtgtgtgtgtgtgtgtgtgtgtgtgtttatgtgtgtgtgagctctgtggccatgccagtgttgagttctgagaaaccaaggaaataagtatgaaagtatggcatgcctgagtttatcgtgtgtgtgtgtgtgtgtgtgtgtgtgtgtgtgtgtgtgtgtgtgtgtgtgtagggggggttaatgatagcccagccaagagcctttatctgtttaatgtagcagaactcaactgcaggaaactcaactccatattagcatatcatgaaaatgtgcagtgcagctgcctgggaatgggcagtttattattgctgggggctgtcctgggttatgatctggaagaatttgaatcgccctttactttttttttcctgctctcctttgattttggcagtagcagaagagagtattcccatgagattcaattatttcccttcaaatttctcttggactcataatggctattaaaaatggaaggcacccatatctcatgctattcagcttaactggtaattaaagtgcaattaaatttttcacggtgtagattgtgtctgtttttttccaggggaattacaaaccctgagcccttgagaattatgggattaagctatagacatttaataattcaactttgatccgctgccgcccctgatggggctctaaaagggaatggggtgtatgaagtattgttctgttattaatggcgagtttaaattttattcggtttcttagagatcacaaaaaaaaactagcaggctatgaaggagaggccattgcaagtgtagttttgacttggcagtggccactgtccccaatacaagccaataattatctttctcctgccaggccagtgtccctcaagtagttttgtgtaatttgggacatttctgagttgtcaccagtgaacaaggcatcagcatttatttggccggagtttggagacagaattgcttggaacctccgtggccttggccaaatgttcatggctcccctttcttcctcacttaaaaatgatttttcagagcaggactgtagctttaatcattttttggcttctgaaagacattttgtttgcctgaagccgtgacctcaccagatctttgtgccaagaagagtagtagcaggggtcaatctggctggaaagagaagaaagcagcccaccagcagcaagacacactgtcctgcaccgacacttgtgccagcagagtataggaaaacagaggtacagcagcttaaccacatctcccactcctgaagggtggcgccatcctcagatactatcctcagtcctgattggtgggtggccatactcagatactatcctcaatcctgattggtgggtggccatactcagatactatcctcagtccagattggtggatggccatcctcagatactatcctcagtcctgattggtggatggccatcctcagatactatcctcagtcctgattggtggtggtgccatcctcagatactatcctcgtcctgattggtggtgattgtcaggtactcttctcggccctgactcatctgtaactctgtggaagctatgactctccatttcctaaatctattgtgaaaattcatcatgaagatatttcctatgtaggatctgggagacgctcagtcagtataatgcttatgacaggagtgtaagtccagttccccagtacacaccaagaacactgtcgtgtgttcacacacacacacacacacacacacacacacacacacacacacacacgcacacacacacacacacacacacacacacacacacacacacacgcacacacaggcacagaacaggggagggagggagggtcagagagagagagagagagagagagagagagagagagagagagagagaattaaattctcaacttggaagggtatgagtttagtgaatggagacagtaggccattatttatggtattatgtttgttgtcacttaagcagatttgtttggtttttttgtttgtttgagacagggtttccttgtgtagctttggagcctgtctgaaactagctctgaaactcactgagatccgcctgcctctgcctcccaagtgctggggttaaaggcgagcgccaccaccgccctgcgccagcacattttcatacctgcaccttcactgtggagccctagcccaaaatgttcctctgctttcttttcctttcttcttctttttaagatttatcttctgtgagtagcaagtaagttgaatggctcaaaagactcccaattcttagtgtctcccaggagctatcagtgaggtccctggcacatagtaggcacttggtatgtagatggctgcaggggtgagagggatatcctagatcattggatgatggtgtcgttcatcctgtgccaagtcagttgttcattccctggagtggcaacaacaacttgggaatgtcagtcctgttaaagctgtggagtcctgcagtagtgtgcccaggcctgggtgcgcttgtcaggaaggacaacagacaccgacccccatgctagctctcagaggaatggcacagcagcacagtgccagttcctataggaatgccatctagttcttttgatgacctgcacccagggctaggatgaacactgaatactggtttcaaaatagcgactaatagatgataaaaacccaaatacttgttgactccaacttttctctgctgggtgctactgattttggcagtaaactgaaatcaacctttattagttgcccaaaacagatacactagaagagcagaatttatgcaggaagatatgagacccaactgagcagctgcctattgtttcatgcatggaaatacttgattcagttcagaaaagacataaaaagctggaaagcagcaagtcaaatccgtgaggacatcctaataaatttaatcttataataaataacaatttgctctttcaggtccagctttactggtgccttgtgcagttttgcatagctcttccatcctccagtttcttgcctgtggtaagggcatactaagcttgcccttcttatttccagaagattagagtagccttattcttgccttctctgtagcagatggtaatagatgttgaatccaccagtgaaagaaacttccctgtatattcctcctgtttggacaggccaaatattctcttttcttttatcttggcccttgaaccctgggaagcatcctatcatggttttaagtacctctgtgttggcaccatgaatttggaagtcagaatagaggcctaaactaaatgcttgaattttgaatatgagatgtgttccacctgctgtgtggttcagatgaacattttaatagagtttgtggctccagaagtttttgaatgttgtggctgttctgtgtgtgtgtatgtatgagggtgtgttgctaagaaggatctgttagctcatataacaagaaagtccatgagtgtctggctttaggaatggctgcatccagagctctaaaaacacaccaggatgatggagaggtccttctgtgtatgttcatcttgttgactgttgaataaagtactgtttggccaatgaggcagcaacttaggcgggactaggagttgaggaggattctgggaaatgtagtaaaaagaagtcttgttaaacaggaagaaagtgacatagcaggcagactaatatataagcagggacaaacaggaagtggtcgcttttctcttgctcttcctcctggtctctgctctggagtcgccatgtgatctgctggcaagagagggcaccagcagaaggcatccttgataagataagtattataaaatatatagatttgtgataattaagactgacctagcagatgagaaatcctagtcattggccaagcatcatttgtacctaatataagtctctgtttgttacttgggaccttaacatggaggcaggcagaacttgggctgctggcagaaggcaccttcgtggcggcagggctggggcagctttggagtgaagacttactgttacaccaggacactgtctgtcctgatctgtctcttcttgagttgactccatagccaggcttggacttgagaacatctttaaactggtgacatgcaagtttgtcatttttcttctaacttttacagtctctagaagtaagttgttcttttccttaagaggtcctgggacttcccagaaggaattctgtcagtgtcccttgtggccaggctctgaatttggactgtcattcatcatttctgctgtcattcccctcacatgaaggcctgcaggactctacttcctctagtcattacaggtctctgtgtagctttactatctaaagctgtcactagtctgacatttctgatgactgaattggcaagtttgtgcagctcagctgcactggcagttctggagtgccagggtttctcagcagcagtaattgtgcacaggaagttctccattaattttcgcatagatggtttttctcattttgttgttgttgacttgttcctggcccctctcctgcacctcggtgggatgtgtacacagctgggggcaaataacagagtgttggagcatatggcaagccattcctaactgggtcccgcgcccaagatggtgatctttcatgttgctggtggaggttctgcatgccagtctggaatttcacattaaattagcttctgtgactccagtaatgaggaaggcattactgaggagctggtccgtgtgtgccagggcagttacagaggatagggtttcggagctgcaaaggacagtctggggacagacccctgcttctcagatgacactctcatgactcagtgcactaaggaatttgctgatagccagaactggttaagaagcctgaggctcttggtcccagcccatcttgttccctctcagtccatcccccaaaccactgctgccttccagaagggatggccaggtgtatttcccaccctcttcgtagctgctgccttcatggagtcacatgagagagtattggaaactgtagccactttagtcatcacgtgtctgcagagctaagggccgggctttggactacttctatctctagtgcagcgatgcttcttcttcggaagacctgtgatttttttttttttaaaaattcaatattttaaatataacaactaactttctgagactaagtgtatatagtaaaatggttaagatcttcatatcaagtagctattttgtaaattattgatgtcttaaaattaattaatcaatttctatgtgtatggatgttttgcctgtatacatgtctgtgcaccatgtgtgtaactggtgccctcagatgccaaagatgtcagagcccctggaactagaaatatagatgggtgtgagccatcgtataggtgctttgaattgaacccaggtcctctggaagaacaaccagtgcccttaatcactgagccatctctccagcccctattcttgtaaattttttttttaaagaagaatcatcctatagtttagaaggatcaaggttctggctctctgatgttaggatttgtgctagaatctcaggagatgactcggttggcttttgaggaccttgtgaccgttataatcttctagaattcttccttggaagcagtactcagtcacacctctcgcattctttaggtcttcagtagttagtttttcttaatgaaggctaacacaagtaatgggagcaacacgagtaccaaaccggatcaccatggtctaggttgacagtgatgctgacatactcctgcaggatgtatgctgacgtactccatccaagcatccattagccaaagggattgattgacaggcagagtaaggctttcatgagggtctgcaaatggcattgttatattctggaagaacatgatcctgcattactgttcagagttagctcttggttctggcactttttgttttgttttaggttttatgaatctttgtttcctttgtgtgtcattattttgttggtggtggtgggtggtggttgagtcctgaactagaataatttatttgaagctgtagactcagttccccctttaacttggcataatggcttacttagtcttagcctgatcatctaaattgagagtttaaaaatttcctgattctatcgcctttgtgtatcttcatttggggtgactctgagaatgagcctgtccccacttcctgggtgatgaaatggagttcctagtgggttggttattgagcccagaagcaagtgtaagtctttctgagccttgtagctgtgcaggtttttacaaacacatcctcatggctaaagatgctgaatagctccaggccatgctggccacttcaagtgccactaaccctagacactcttctaggaagtatttcaaccactgtggtttaattcaccctgtcgaatctgatactcttttattggcctcattactttttaaaaaattcttctacataaaaaacgcatcaggcacattttaaaagtctagctattttaaatatttgtgactggttctggcataattgtaacacagcccaggaaagtaaactcctttatggtcatatcctctaaatgggactgtttattgtatttctcctccagaaacttctctataaaatctaaacaagacccaggcagttctttctctgcacagcaattcctagtggatttcttcaactcagggtcttctgtgatgagtaaagaatttgctgggcataaccctgcccatatgctaatgaaactcaatggttactaagcccaaagctcgtcctattgtgttctgtctcctccccctgggagcgctccattaatctggagccatcatgcccaggaaaatctttctgtcttcaggtagtctgactctttcccactctccagggcctgccctgtacctcttattctcttgtggtggtgctgaaattgccatgacttgctgtctggcccctgttacaacttgagccaaagctttgttcttttctttttttaaattttttattatttttaattactcatatttacatatccatcccccatctccttgccctcccctcctcccatgtttcttatgcctgtgtacagatcgttcttcaagggcaaagttttcatgagttgttattctagatgtcccctttctcaaccagtttgatctacagaagcgatttgctcattcactgaggcacatctgcatggcaggcccatgtgccacacgctgctagatacagcactgtgccttttaaaagtcatccacgaaccttgtcagcccatagctaatcatgtcctgtgagctgcaggcaatagcgatatgactgcagaatagagtatatagttataaattacaccaaggaaggaaagacaccctgtcatgggatcttcatgcagcaggcccataggagagcttgccatgctatgacccaccatagacagcctgatcctcctgaagaatgtgaaaaagtagggtgtcttattctgggaaaacctcaggatggccagctttctactgccgcccataagcagagggccttggaaatcatgtagcagaagcacaggagggcagccaagaagtagcagagtcccaaacagagttgcatgcttcctcctgctcggccatgtgtggtagacacatgttcccagcacatcaggcagacattccccatggctgcagagaatctttgtgtgtgtgtgtgtgcgtgcgtgcgtgcgtgcgtgcgtgcgtgcgtgtgtgcgtgtgtgtatgtgtatgtgtatgtgtatgtgtgtgtttccttctccctatgagctactcctcaggggacctgcccagactctgtctgtcttattccttaggactcatctctggctattagctgcatggggagcactgtgctaaaagtgaacttgattggtcttggctggcaggtatccatcttcctgcccatggcctgagggagaatgcttcctgagaatagtcacagaggagatgtgaaggacagggtaggggcagtggttcaaaatgaggctgaccaggtaggtcacatcttaggtggaagctgtgtgacagtctcctcggggatttatgactccttggggtggtggggaaatgccagctgctctcacagttcctgtgaattccagcatacagctctaggtgagataccccatgagcagtcctctggttcactggcctattaacagaaacatcagggagaaactcacctaggacaggacagacagacaggacagacagagcctcctctgttggcatcagagaccaaaatgcaagaagagcagtgtgctgtgtatggcacatttatccacacgactaacgctccagtgaagaatgggttcctttgcataatcttgctcttgacttaatcacttcccagacacccaccctgcagtcaaacctgccagatgcccattttactggaaaggggacaagagggacttctagactgaagctccctctccatcatggaagctgcacagtgtagctaagctgcatgctctgcttggtaaagtcactgacccccagatccgggtcaaggaaagaagggaaccaggggctgcctgaaggatccaccttgaaacagctggatccaagaatcccccagaggttcctggattttgaaatagacaataatagctgagagttgcatatttttttaagtaggaatgcttccactttctagactaactcatttcccctgaggaacatttggcaagtatgcatagtcaacaaagcttatcgggtttccgagcaccaagctataaatccgagctgcttagcatccttgaacccatatcatggagtcttacagcttttgaagatggtggaattctctagaagtcagaggacaccatccttaaagagaagcattgacactctcctgatccagctctttgtcagaacccagaagcattggagaagacccatcttggcccaactttgggaacatgccagtagggtgtttgtagcctgcgtgagctctcgggctatgtcttgtactgccagttagtggagcctcaccctctcccctgttgtctgcagcagtgggctggagagctctgtggagagttctgtgtgggaactgttgggaatgccttttacatggctggggagatggctcagttacctggccatctagaagacacaagttgaatcctcagagtccaaattacaaatacaggcatagcatagcggggtgcacttgtaatgtgcagaacagtgaatccctaaggcttactggcctcccagcctagtctactcagcaagttcctcaccagtaagagaccctatctcaaaaatcaaaatcaaacagacaaaaaaggtagatggcaatcctaaggaatgacacttatggttgtcatcatctgtcatcattgtcatcattcctccacatacacttgaacctatgcacacacacacacacacacacacacacacacacacacacacacacacacacacacacacacaacctactggtactgctgaagaagcagcttcctctggcacctggtccctcactgcaggggctgctacagtcttgagtcattgctgtttagtggcttcccaccctcaatcactgccttcccatcctgactgactaatcagaaaggtctcagatcagcagacatttgctgggcagggtacagttgtgtcactgtggtcaaagagtgagccacagatacagaggtcaaggcagaagtgagtgctgcttcaggacactcagtcattcccaacaaaaagcttaaacctctgtgcatgtcacatgttgtcagtgagtttgagtctgtggtaagttggaggagtctgggactgctgtcttcatccccagtctctgtagatgggggggaaaatgtatttcttaagaaagtggcaactttgtaggaaatggcagaggaaatccagcccattcctgttgcttttccagcatgctaccccaaataaacatagttaatcatggccagcgcctcgctgtgtgttagcgcagtagcacagagctgctggttggcagtgccagaagtcatgaagaataggctcacaacagaccagcatcagcttcacatcgccatctatttggatggcacttagtcccacttagtcttgtttagtaaatttgtattgcattttattttcagtaatgtgttagaatgacaggatctttgattattgtatgtagttatttaagttccagatcattcccccccaccccatctaagtcctgaaaaagagatcagacctctcttgccaagaactatgtttgctgtctccttgtggcacgctgtagatactcttgacctctgtattcatgaccttcatcaactttaatgtccttgatgtatacgtgtttttagtaggatggaggtgtaccctgtatctgctgtttggggatattgagattgcaatccaatctgaagaaaattgatcagctacttagagaccactaggatggagtgatgagaaaaagagcatgtgtataacgataagtctttccgccaagccacccgagccccatgaccacgtaggcgcctgaaataacacatagagacttatattaatacagtgctgctgtccaatgacagcaggatttcttatctgctatctctgtcttaagtatcaaccataattattaatctgtatattttataaagatttatctgatcaaggacgccggtggcatgggtcctctcttgtcgggctcacatggcggctccagaaaagagagcaggaggaagagagtgatttactgcttgtccctgcttatgttctgagtctgcctgctatgtcacttcctgtctggatcacaagacttctctttacatttcccagaatcctcctcgattcctagtcctgcctaacttgcttccctgttgaccaacagtactttatttatcaaccaataagacaaacatatacacagaagggcttgccccatcacatgtgagataatgttttagctgaaagagaatggctgagaagaggacttggagagttccttctccccgtacatgatcctgaggcaaagaagtctgggttaaccacagaactgaagtgccaatgcctgtgattggcacatatgggcaatggatgacataaagtcagaatggtcaggggacatcttagtcacgcagcacagttagagcgtgctttaagccaccagagacaaagtagagcaatggcaagtggaaggatgtagctagacccaaaagcaggatgaatgccctggctgagagaaagagaacatgaggtggggttggggctgacatcctggctgcttggctctgggtaacaacagtgaaattgccagcagttggcttctgacatgtactggttgttgtaatttaagaaaagcagtgcacgagagaaagatgccatgaaacagggttcaaacagggtttttttgttgttgttttgttttttattagggaaagaaatcataaaaaggggaaagtgaaggggggaagccagcctctggagacaggagcattgggagagagtggagagaggagtggggggagaaagaggggaggtgggcagggcccttttaaaagggaacatagtgaatatgcacaggtggtgctcttagtggctgcaactgagggcgtatcccgtcagaaccccaagaataggccagtgcctgaatgctaacactggttactgcatgtgtactctatgaagaataggccactgcctgaatgctaacactggttactgtatgtgtactctatgaagaataggccagtgcctgaatgctaacactggttactgcatgtgtactctatgaagaataggccagtgcctgaatgctaacactggttactgtatgtgtactctatgaagaataggccagtgcctgaatgctaacactggttactgtatgtgtactctatgaagaataggccagtgcctgaatgctaacactgggtactgcatgtgtactctatgaagaataggccagtgcctgaatgctaacactggttactgcatgtgtactctatgaagaataggccagtgcctgaatgctaacactggttactgcatgtgtactctatgaagaataggccagtgcctgaatgctaacactggttactgcatgtgtactctatgaagaatcggccagtgcctgaatgctaacactggttgctgtatgtgtactctataaagaataggccagtgcctgaatgctaacactggttactgcatgtgtactctatgaagaataggccagtgcctgaatgctaacactggttactgcatgtgtactctatgaagaatcggccagtgcctgaatgctaacactggttactgcatgtgtactctatgaagaataggccagtgcctgaatgctaacactggttactgcatgtgtactctatgaagtgctgatgatggctgctgaccctgaaatgatggcacctgggaaacctgtgtgtccatggctacaggatccagatgcgggcggatccaggcctgagacaaagctaccttccaccttagtgacagatctccattcctgtcattgaaagtagggtgcctgagccactgctgaagagtccatttatgacgaagaaagaggacatcaagaaagacagtggtgactgccaatagcagtgaattcattccatatggaaacaaaacagtagaataaaagtcttaaatatgcggcaaacacttaaagagaaacaggaccttctagagtgggcaaacaaataaaattggagaactgaatagaaccaattggaaaactgaaaactatagtcaatgaaataaaacaaaacaatgaatttatatattgaattaaaagagaaaactgaggaatttccttggatagaaaaagaaatctttttaaaaattatttttaaaagtagccaaggggctagagagatggcttggcagttaggagctgttgttcctcttccttaggcaaggtacggggatggaaggaaagacagtgaaggacaagagtgggactaggcagggggtgaggatgcattgagcaggacagcatttgagagactgggctaatggatcctcagcaaggcttttttttttttttttttttttttttttttttttttttttttttttaattgagaagagcaatggcaaactgagggctaaaatgagatgtgccccggggcatcgatggtcaaatgacagtgtgacttgagagtctgagtagagactgggtcacccgcagtgagaaaggtgcctgtcaagtcctttctgggcctgagcctggtctagaaatcagagatcattggcacagctccattcctgccagcaagtgaggtggcaggtggaagtctcctgaccaaaagttcagagagcatgtagccagcacctccagaacacaagcctttgccagggagcaatgctcagtgtatgtctgatctataagggcatatatttcatcaccaaaatagtcctgggtggcagcagctgctgagatgaaggaagaaagccaaaggaatcctttgaggtgttccatgcctttgaacttaatttcttccctggatacctcctccatcccaactcctgctctgtggctccctcttgcctcctttgctgctccaagtgccacatttgtgaaagagagaaagagagagggggagagggagggggaagggagggagggaggggaggggaggggagaggagaggaaaggagaaaaaacctgtgtgctagctaagattatttgatctatttatgaatcatggcttagcagtatcttgatagactcactattggcctggtaccgccccaaaaaatgataagccagtagaatgtcaaaattccgtgtttcctgggatattaacagatggaaatatgtcctcttagctttaatgaggaggttgcttggtgtttgtgataataggcactatgaacagaactctttgggagtatactatgccatgaaaattaagcataaaaacgaacaaaatctgattttgaaaaaatccctggttgctaacacacagaaaagccatgttagcacagacccattttgtagtatattgtgttatgtgacttaagccaattcatcaacttttgtgaattttaattttctcatttataaatgagaatgtctacattaatgttcattcaccatgctgctgggggattcattatgcagtcctcggtccctgtaacagtactgggctaattgtgggccatgaataactatttcttaatgaaatggatgaatgtcaaaaccacttggaggctcctaggatatagtcttagttgttatcataagccagccattgggtgggatgatctccctctctccctcccctccccctccctccctctccctctcacacacctgtctaaaattagacttcttatgaggtggtctacctgagcggtcctgtgtcactgagcctgacagtgaggacttctagggaggaggggggagctgactgtggaagggagaggttcagaggtaaaattctggagggacataagcacaagcaccataggggaaggaagacagtgatgggcagcaggatgcagctggcaccagggattctgctgggctttttcagtggcttccaaagcacaggatgagtggcctcggggaacagtctggctgggagactagaaaggagcaggggaatagattgaatttctgcagagccggcacctcctggtgctcatgagagtgtgtacacaagtctccccttcccctttcctctcaacccctctctctccctctctcttttctaagagaaagataaactcattaccttcagaaaatgataatccgcccggcagagccctgcttcacagccccactcaagaaaaacacagacaagtgacatagaaaccttggttacctacagagacaatgtgccactctgccctgactctaggactcctgccgtttccatatgctgtcttgcagtgtcctggcgttcacaaaataaaccagcccactgcattagcaagcattgcaagcagcactgagggggcccaacgcaagagttggaaggactcttcctgcccctggccggacctctcttcctaggtgagataccagtttcctttttcccaactgacttcactccccatcaaatgcctggagcaatttagtgaaggcatccactgcggataggaaggaagtagccagatgaggaggtgactgtattctgggttatcatctgctgtggacttggcttcctcctggtatggtctcagcttccacatggtgccgcctcatgagtgtgcacagacagggtgaggagagccatcacagcagccacagcgcccgcatttcctgccgtctgacagcaagcaaatccaggtttgcatcacctacttcaacttccctggaatataatgtgtcccgaaatatagagtgaattaagcaggaaatatatttacgtctcagtggaaactaataggcatgctgattagctgtggcggactgcagtccagttctagattctgattggaccccaagctttatgtcagcaattttgagattcatgaagatgttcaaccatctcaacaacaacaacaaaaaaggggggccatccgttcaaatggctcaagtgaagccagaaacctctactaaacttaacctggcctctgctaggaactccctctttatttgtgtagtttgctgtggcctttcttaaagcgttcatccctggatggtcagggaggctcacttgggagcaagccataggtagtacagtcactttcaggacccgatcccatcctagaagaactttgttgaccttgactctggctgaacacaccactggatctcgtaatgcctaagcagttagaccgcagtgaaccccactcataactcagctagtctagcagccagagtggtgtgtggttcacatggcaagtggcacggaggtgtttctccaaccgtgttctatactcacgatgctctgtaactttcctttttaatctttgtattgtttgagaaccaggattttatgcctacttttcccactgcccagaatattctttttcagtctaattttaattcatctttcaacctgtccccaacaacaagaacaaaacctctcttgtgagacagtccctgcggattagagtaggtcggcctgctggaagtctttcccatctttgttagagccttacaagtgctccttgggattttgaaagaccagctgtggagaaaggaagttcacctaacaagtgaatcttttccaatgcctttgtgagctcagacttccataaaggaagtggggaggagttcaccaagggaaggagacaccagtaagaaagcctctgtaaagtttcacaccagtgtggaaaataaaggttgtcaggaagcaagggatggagagggtgaagacaaatggtgcttatttcaaaatgttgattgagccggccaggcatcagggctggacttgacaaagtgattgtaaaaggcatcactactgtggaattatgggagtcatgcaaacagcagccacagagtactctagagagaaggagacagagtgactttctctgccagcagaaatgagccttttatttaaagcaagaagagtagtaatttgcacatgttaaaaatctacttcccactgtaaaactcctgagatatccctagcaaggcagtggctctgcccaggagatgattgcaatcttgaaaggcaatggggatggaataggcattgtaaaggcactgccctaatgaacacagttctgtttgcaccatcaccccctcccacctccagcaaattctattactccctcagcctgctagagatcagtcaggtcttcagagaatagcttgtgaaagctgagttactccatgacaggatttttgaagacaatgtaatttggcattcctcaattttctctgattttgtgcagagaaagtagaagactgtcataaatattttcctcaaatagcgttataaatggaagcacagctggcagagaagtgttctgctatttgcttggttgctagattccgggttttctatgggaaacaaccatgctggcagattcattggcttcgcatttctccaacatgcttctttttctctcagttaagtgatgaattcagttccgcctgtggactcctggtggtcgggtaatgccggactttggggacgtctgtgcttcgtggattcaggacatattaggggctattgaaactgattggaaatgttattgtgcactgttagatgttaacccagtgcacggagatgcctaagacaaaattggtgggtaggggagggttagtgaggacttgagatggtttgggcagatcacatagcctcctgggagcttgggttccacgtctgtgtaatcatggcaataaaatgcacaatttttgctagtggtcagtgaaattagtggctatgaaattgccccaaagtacatgaaaagcgaacacttaagcccactgtcataacatagtcttttggccctggcacacaaacccacttcttgtaagcctctttacccccttaatgtctcattaccttcattcactggccatatgattaccacagattgtagctcagtgcttattttttaacagagcttgttctcaactgtcaatctcaagcttaagtactgtctagagcttccaagaattcttaagaaaggaactcaggctggcaaattggcttagttgggaagacacttgctgccaagcctggtgacctgagttcagtccccgggactcacatggtagaagagaactgactcttacaagttgtcctctgaccttcacacatatgccttggcaatacactcctcccacattaataaatatattaccaataaataggtaaatgtaataaaaggaaaagttcgtattaattgaaatcaatgtaattgtggaatgtgagctctgtaagagatacaggggcacagggtatagggcaaacccctgtgatgaggaatcacccaaccacaggtaggaatggggggtgggtatgaaatgctctctaaattatcctttagatgccccccaggaggcacactagagcacattataaatattggatgggcagtagaatcatttgtgtgggtgatggaatgtcctttaagctgttctgagatggagatgttcccagacaagtggaccatccagctgaggctccagatatcatagagcagggaagagatatctccctctccctctccctctccctctccctctccctctccctccctctccctctccctctctctccccctcccctccccctccccctccccctccccctccccctcccctctacctctccttctctttcctctccctctctctctctctctctctctctctctctctctctctctctcttttgaagtcagatatgggaagtgtgtaaatgtagggaggggctgattgttctctatctgtgcatttgggagtggtttcttaacagcagtaagtatttggagctaatcttatttaactgtagatggctggggctccctgtatgcctcactgccacactgggtttcccgaggagcaatggaaacctgggggcaaagggtcatgaatagacttgcccaggactctgggcctcttcctctgtcttgagccagtctatatcccagccttaaacttacagtatttctagcacaggttctcacgtatctgggattgcaggtctgtgccaccatgcctggcttcttgggatggttttaaaagttgcttggtattttctgtgtgtcttctacctattttcaatcatgtaatctataaacacagcttcttcccttctcatgtgtatcatgtcctctttcgccccatcttactgccctggctgtactactgcactaagttaaacagagtggagtggtgacagtggccatccttgtattagagaaaaaaagattcagagttcatgattgccagtgatatcataccccaactgccctttgcccagtgctctttgaatctctgcatcagatctataagtgaacaaatgatgagtatgccaaatgttcttacagccgtgtgtatttttgtctattgggtactcgttgactgaaatggcatcttgttttgccatgtgtctttgatacatgaaacatgtatgttgaaaaacaagcacccagagttcccttctgccaaggttctttttaccttagccttctcttatcacattctttgtctcagtatttgtatcagttttcaggctgatacaccgggccttcctgtgttgccgcttcccgcctctctctgccttgttacttcccgagttacagtctgtacctagagcccaggtctgagttggttgaggagagagtgggctaagaagactgtgaggccactgcagaagccattcccactctgcgctcagttgggtagattcccatttggtctagacttgcgtttccggtccgtgattcagagggtgggaggggtctttcccagcacccaggcaagcaggtttactcacttcctgtgtaaccatgcattgccaacagcaaggttgtagctcaggagactcaggcattaggcagcctctctctgtgtctggcattggtctgagttcttttttagaatgtgttttacatgttcaaagtctgtttttatgacttaatagatgttttaatagctaattgggagttttgtaatggtgttaacttgtcaggttccattgtaactatgtgatatacactagtataactatttgatacataaatatcagatatattgatatcctgaatggtgactaattttgttatatgtgactagtcatattccctgcttcaaatcattaaaataggactgggagagcaacccagtgtagagcatttgcctagtcttatgagaacctgagtttgtccccagtgccaccaaatgagtaagtaagtaaataccaaatagcaaacagtccattaattatacttgaggaaaagaaagaaaacattgccagagctttctcagagccttcaaattttactcagcctttggacgagggagataggctcagtggataaggcgctttccatgcaagtgtgaagactgcagtttggatccacagaacacacataaaaatctgggcagtcatggcagccacttctaatctcagcactctgcagacagaaaaagtagtcagcagacaaactggctagctaagagtagctaagaggcctgccttaggaaagtaaaaatggagactaactgaggaagacacctccctataccccagcttcatgatggcgcgagcgcacgcgcgcacacacacacacacacacacacacacacacacacacacaccacaatcattgcaatatacactcaaaaatagcaaaataaaataaactcgattgtttgcttcttctgtgaaatgtttaaattcttgagtcatttccctacttgacaatggcaaaattcacatggcttccaacagcggagacccctcttctcagggacaccctttatacaacatgctgcttgcaggctgaggaaatgactcggtgagtgaaagcacttgccacacaagcctaatgacatgagttttatcactgaaaaccatggaaaaagccaggtgtagtggtggccataagcaatcccagcattcctttggtgggatgggaggcagagacaggagcagggtggaagctccctaggccagctagcctggagtatgcagtgccacaatggcaacaaaagaccctaaagcagtggtcctccacctgtgggtcacacgggggtcagactaccctttcacagggggcacatatcagaatcctacatatcagatgtttacattatgattcataacagtagcaaaattacagttatgaagtagcaacaaaatagttttatggttggggaatcaccacagcatgggaattgtattaaagggtcacgtgttaggagggttgcgatccactgccctaaaggtaaaggaaagcaccaactcctccaagtttttcactgaccacacacatgcatgcaaagtaacacatgaacccacacactacacacacacacacacacacacgatagatagatagatagatagatagatagatagatagatagaatggctacatgtctgcattatagaaaactgttaaaatcttgcaagttgaagtatgaaggaagatcactcatgaccacaaagacttctacagaaacatgcaaggaactagagtgatttgacctctaagtaggggtttggttataacgagaagcctatgaaatgcatgtgcaatgcagtggtctaaggggggctgtgtggttgggttccagagaagggcgggttagccagctgtgtctccctggctgtcttgtcagagacgagtccattagcagagaaagactcatgtattgggaagatgcattttcttttctagatacgtggaactctgggaaaatcattaataagcacatgtctttttaactcttttttaattacttcttttttatataaaaggctaatttattttatcatatagagaaatcttgtgtgttttaaaagaatccactttcatgcaaaattgggatattctatacatactttgaagtcaagactagtggtctgaatttcgtcctggctacatactacctgtgtgatcttaaacagactctgaaaaattgtgtcccagtgtttcttaaactttaaaatagaagtgaaaggaagagctttttaaatgaaggctctgattgatacagagaaatgtaaagtaatgtggttctttgaggcctcataaaacaactgtgctgttatttgtcccttcccctcttcctcctgtgctgatctccatccatcctccccaggtggagccacctgcccagttttcatttctctcttcatgtcacctgtgtcctgctagttccccctcaagccccacacatcgggtccctttacacctggtctttgtagttagtccatgtcatacgctcacatttgaaggtcaggaactaggaagcacagatgagaggggacatagggtgtttgtgtgtctgggtctaggtcacctcactcagtagaatcttgtctaggtccagccatttacctcaacatttcacaatttcagttttcttttctgctaaacagtattctataggatgggtgagtgagtgtgtgtgtgtgtgtgtgtgtgtgtgtgtgtgtgtgtgtgtatgacgttttcattattcattcgtctgctgaagagcatttaggttgctcccatttcctggctatttgggaatacagcaacattaaacatggctgagcagtatcagtgaagtaagatgctgagctctttgggcatatgccaaggaatgatatagctggtccataaggtagatttatttaatcttcttgaggattccctgtgactggtttccagagtggctatgcagtttgcagtgctaccaacagtgggattccccctccccacacttcctcattagcattttttgggtagttgtttttattggtcttagctattttgacctgggtgagatgaaacctcaaagattttttaatttgtatttccccaattgctaaagatgatggacactttctgagatatttcttaaccattttgtatttctgccactgagcattctctgtgtagatccctagcccattttttaactgggtgaagtcatacatatacaaacaacaaaagtggactcagctagttaagtgtgtgtatgataataaacatgaaagaaaaagaggccattgatttgagagagagatggagggcatgggaaaagttggagagaaaaaaagaaaagagggaaattatctaattaatttttaaatttatttttatgtaattttttatacaatgtattttgatcatattctttcccctcccccaactccttctcaatcctccccaccacctccctaccaaactttatgctctctctctctctctctctctctctctctctctctttctctctctctctcaaagaaaaaaacttaaatatagtaaggcaaaaaaataacaaaatgtgcacaaaccatggagtgtattaaacaaaaaggataggctataggaaggctcgggcagtgtgtgatgccctgttgtgtactataaaatgatggggtatgaggggcacctctgcacacctggtcctgcagcagttagcgagtgacactgggtttgattagccccttagagctactcattctgccaggatcaggctgcagctctattaagtctgtcccgtagaaggcagtagaatggtgcttattggaaaggtaggaaggagagataagttaggaaaatttgtatcaatacacaataagaaaggagtaattagctcttgttttctgcagtctactagactaggtacagtctataacattcatgatctgtttcaagacatccagaagactttgacagttcccaatacatatagatgttaaatgttggaaaatatagaagtgttaattatttttatttcaccattacattgtatacatgtattgagtcattgcagtgtataccttaaatctgtattgtttgatactttaaattttaaaaattaatagctctaccatttctctaaatttattcaatctctttgtgacttagtttccagattgaccccccaaaaatgttgttaatagagtaactgcctattaaatgatgtcattttctcacaatgttagttcagctatttatacatttgtggttctgggtttgataaatgtgaaaaagttagattgaaggcactataaacaatgttgagaatattcctcccctgccgccatgtttcatttgcctgtttgcagtaactgctccctgacttagctctaggcacaggcataggtgcgtgctgcctctgtggttttgctttttctaggagtttcttgtcaatgtaatcacagttagttagagtgtgtcttagttagagttcctgttgctgtgataaaacagcttgaccaaagcaacatggagaggaaagggtttatttggcttatacttccatgttcatcatccaaggaagtcaggacaggaactcaagcaaggcaggaacctggaggcaggagctgatgcagaggtcagagagaggtgatgtttactggcacagtcatgccagtgttcagctgccaagaggcttcagtggtcacactcagcctcagagctggtttccattgcctgtataggaaggatagactgtagaggactaataaaaatgtctcaataaaaatggcattcccaagttctctccagaacttaatacctaacgtacagtcattgtcgaattcactatcgtggtttgcctttttaaaacacctaaaaacaccatcagatgtttcagaccttaaatagtgctgcaacatttgaaacaggccaaagacaggcaaaggacaatcgtgtcgcgattaggagtattaaaacggaagctgctaacatgaagtggaatgctggtcccgattgtccagtttgcaggacagttttcctactttgcatcgtattgttagtgggcagggggagcaggtttggtagagtggagaggaaaccagtacaaaagtccagcctttggtctgaagagtcaagcaatcattggtgagatagggagcgcgctcagggtgggtgtgaccgcgcacagacacagagacagtctggaagttacagacataagtcatgggcactcagttcccagttcagtttctttaaagaaacatcaaaatccagatagcatggctcagaactggttcacctatccatgtgtgactcctaacaggcagtgtatagaagcagtctggctgttccagcctcagccaggctttctgtgtggacgcacactcaccctgagtttaaaaggaataggcaaatgtaaaaagtggctcttggaaaataagccacttactctatgggcctctatggaagcaggtgtgggactgtctactggagcatgggcagcctctccaggatcacatccccagagaaaactgactctttttccaccagcagcccccagtagctgatagttcctgggccagcggtgagactttgtgagtcctttccccattccaggctagggttttggctggtttgcttttgcacaggtctggaagcagatgtcacctacctctggttcctgcaatctttctgcctttgtctaggcccccccccttttttttttcttttactctgcagcaatgtcaagtgattttctgtgtctggcaactaattaccacatatttatcagccctaaggaatataagagttgtttgtgtttgaacattgttgaatgcattcccagtgtatacaacaccatcctgtcactttttgccttcttcattctaatttgtggctttgcagctcagtctcagctcctgaggctggattatatggacatttagactaaataaaaagcttcttcagattcttaatatctaatttgagattcacctcaacaatggatcatacacaaatgtctcttgaccatcaagtttgtttgaggaagaaagccccacctttggggcaaagggccctacttggaaactcgtaggagaagtgaaatgtgagatgtattattttgtgtacagaaacggtcctgcttactaatttgtggtgtaaaagaaacccaagaaagacttcattgtgatgttgtcaggtcctgttaccgtgtggttctatgaatgttcttctcgcactaagtaaagtgcacagagacacatctgactttcccagtggcgtgggacgccgggagcacgtgtcataggcacagtacgagttgagggtttggggcacaagtgggaatcacagctgatctccccagtgctgggagggatggaggtgggacactggtgatggtccatccacttggggattagcagctttcagaactaatagactgggttaagtgaggtcacaacaatggcttcttgggctgtgtggtctgtctttcctctctggctttgtttcctgttagagaggatcagagaaggaaacaacaaagaagttatttgttacaaatcaaaacttccctgtcacagagacataaataagttccatacaacagctgctttaaattaaacagagcccggggcgcaaggcggtcctgtggctgctcacatagccttgtcccagttacccatggtgctcaatgctgattcctccccacaattggagtcctgaagccaagtctctcagtactgagtgcaagctgctgcttctgccattttagctgtcaggtctgtatctggaacagagtggaagagcacacggtgcacctcactcactgtgtgtgtcctttcagtttaaggctcagagtggaataaaacaacagcgcctttgcagatttgtggttataggagtccctccctcccctccttccttcctcccttccttcccgctctcctccctccctccctcccttcctccctcctccctccctccctccctccctcgctccctcaagcttacaaaataattgaaatttttcatggggtgatattgtcaaaaagcttactttcacatagaagatatgcagtacttcatcagggttctactgctccaaaggctgtatgtagtcaagccaccgccatcagtacagtcaacccaaggtagtcgtagcctgtcagcagtgaacctatgcgaatacggcacagggtcttgaaagagaaggttccaccatctgtaaaggaagaaaagtaaaacccaatgacataggtagttttggtttggtttggtggagttaagaacactgtcagacattcacagcagtgcggtattagaaggagccttcacagccagtgcctgggctctgtgaagaccgctgtgatgatttctctccccaactcttcccgctggcaaaccctcttcacgaagctgtatctttgaatctgtgtcttgctgccctttattacttgtgcagtttctcggccttaatgcttcagaccttgctctccccacttcttcccttctcttctttgagactccagccagcatgcacttcccgtgaattatgataagtacattcattcattcatcctgaattccagttcacaaacccagagccaggactaatctgattaacttattagttatcacttctggagtttttggtgccaatttctatataattctgatctttgccagcatcctttcttattatttacatttccaaatatacttattactggcatttttgttcttttagacaggatctctcaacatagccctggctgtcctggaactcattatatagatcagactggcctcatactcacagagatctgcctgcttctgcctcctgagtcaacactcagattaaaggtgtgcaccaccatgcctggtttataaaaagtctctctcagaacctagatatgttagtacaaaagtctgttccactgtctgtatttcctctcccttggtcttctgacagatagttactttcttgtgcacctggatagagtttggttgactgcagactattgtacagagaaatcaaacagcctgacactttgcatgatgcatgtcattcgcagaagtatatttttgctgctagcaatcaaagtagaaacctatcaccttaattcaggcaagctttggattaagtgattgactctgggtagtggctgccctatttctcgtctgtcacactcttcctaggttgcagtcctttgggagtcactgatggaagcctggtgttgactcaagtgcctcctccttgttgagtcctcagggtaggtcaccgtgttccatgtcagtgaggccatcagagccattgctcagctggctggttttcctggccctggctctcttttcaaagcatcacaaggagaagtagatctgctcataagcctcacctctctaagcttccagtcttttccacaactgtgagtccttaggtccctgctgttcccatggtctggcttaccttcaaacagggttgtttttttcttttaaatagtttgacctttttttttttcttgtccatagcaggagtcggtctgaagcaagctaatccaccattgctgggaaaagagattctgctgaagatatttaagtcacatctcagacattacatcatttaacataaaacaggtggacatttccttatagcccaaatgccatcgcatgctcagatttccttcgttatctgagaaaggccttttaaccattgctctgtctgaatcaggatacaccaggcctgcgcattacatgtgctcattacagctcttaagtcttttgaaatctcaactgttttcactgtcatctcttccttttccttccatgacccgttaaggaccctgcattgaggttctgtgggttcccacagcctcggctcagccagctgcttctccactctcctttatcacttgtgtttcccataaaatggaattaaactttatgggctccattagattctgtttgggtttattggtttctgtttggtttggcaaggttgctgtaaaggtaatgccaaataatttcaaccgtgtcccctcagacagcactctgtgtctgtttgccccatgtcagtgactaatgagtgagttcagatggcaacagtctaaccccaccactggaagattccccaccatcttctcatctagaagctctgtctagtgacacattttccccctgcaccagattttcaggagttgcaaactggtttttcaagctccatccccattccacacttctcagctaaaacccataaactagatctacatattcattcagagctgtcgattcaacaggcaggttaagctctcctcttcggaccagcaaatgcttgatgttcagattttaaaagcaggcctgggcactacactgcctcgctcagccactattgaagcaagatgagtgttggtgtttcacagtggggaaaaccgggcatgcagtgaaggccctgcacaggcttctttgctctgtgttctttgaattctctaagactccaattccttgaccctcagcctctgcttagacatgagagtgaggcctggtgtgcctgccgttggaaacagttggaactgaagctggtgtgtgcttcctctcttctctggccagagtccttccctcctgcactcaccacaacaacactgagggcagcgttcacgccctaggcccagccttctgggtatggggttgcttgccttgttcctatgaaaagaagacttgtaatattcagatgagtacaatgccccatgagctgaccatggtggtctatcattctcaggtgtgtttttgttgacgtatctctgagtctgggggctgtgcatcccagcaggcccccagatcctgttgcatcaactctatgaccttatttgtctcaaatcctccttttttatggccacagccttaaccccaagtgtctctgatgtatcattttctccctccgctcaggtcaacatattggaactaaatatatgacttgtaggatttgagcactaaatcattctccttcctgaaatgttattttaactctcgcatgaatgtttgtctgtctggtgggatcattgggccttgagggaaacactcatgtctgtccagtgtggtatttcccccttgagcctggacacaatcccaaatagacatcagtggttctggttctctgtttcctatctggtgaagcattcttccctcaagagagtgccatggataggaggacttgggagccgaatatatctgcagtgaccagcctggcctcaggcacctccctccagatctgcatccagcctccctgaccctgaccactgaccaccgactccttcccgtgcccctctccccaacaagccccctaccagcaacccattttctcctcagtctaaactagcaccctcttgccgcaccccaagtcactgtggtccttgctgctccccaagtcactgtggtccttgctgcttcccaagcatcagtgcctgtgcagggagcgcagagggatggatactcatgcccctgtctatgttgtgacttaatccttagttctccagcttagctccgtgtccaccagggctaagaatgcaccttgggctcttgcagaggcctgatagcactggacccagaacccagcccctcacagctgtgctttcccccttgatgttgcaccctcattcccgttccacccccagcaaaccttcaggctctctccctgtgcagcccttgattgacatctgatagccctgtaggtgaagagcagcagatcctcagctctctcatcacttccctgtgcatggaaagcccacaccccaaatggaccacccagaaggagtgagcctccccccacagagcagcctggggtgctgctccagccggttagcatgactctgattgcacatgtcagctgggaggcctctgagacccaaagtccctggccgcccctgactgagagctggctcactgaatttttgtgtgggtacccccccactccccacaagaagctcctgctcaccctcccttaagaaactccactcagttttaatcttccggtgacccaggcaggtacctgtcacggcgtaattatgcaccactttctctgccatcacagaaccgaaggttttctttccttctgctcgctgacatgacagacacccacttagcagagagattattagtataaaattactttttggcctttaaatttaactataccatattcacagcaataaaataaaaccccaaatccaggtgtgcctttcagggaacgtgtctggggcaattaccttctgataatggcgtccagcacttaagccttttgtctggggatcttgaaatcatttccatacaactccataatgatgttcattctggaagggacaagaggttgacctcggagcatacaccagagatgaaggggaccggggacccaggtgtctgctttgttctcatctcctccctttctgggtctttaaagaggcacggtccgccttctgtggcacagtgcttgcccccaggttagcaatctacctttctatgagcatgaatggataggtctctatatcaaatttcatggggaggaactgaatcaaggaaatgggggtgcagaagatctgttactcaggagcccttaactgtggactcggtgggctcgtagatgaagggcagctgaagcacagccacacgggctgggactgttgaaatcagctcctgggctgtctgtgtggccatgggctataaagacaggtgcctctgtctccatatcaggactgtctgaatgcccatccttctccctctagtacagtcattccaagttcttgggggccagttgaccccatgtttccttctccaatccgcccagccatcagtaggttctctccattaactgctgtatcatttttgccctccacttaggtcaacaaattggaactgaatatatgacttgcaggatttgggcactaaatcacatccttcctataatgttattttaactctcatatgaatgtttgtctgtctggtgggatgattaggccttgagggaaacactcatgtctgtccagtgtggtattttcccttgagcctggacacgatcccgaatagacatcagaagcttctgcgttcacttaaaacagtggttctctgtctgtgggtcacaacccctgggtgaacttctatcttccaaaaacatttccattatggttcataacagtagcaaaatcacagttatgaagtagcaatgaaagcaatcttctggttggggggtcaccacagcatgaagaactgtgttaaaggatcgcagcatcagggaggttgagaaccacaggcctagagcctgttggaggcagaatagacaccgcaggagtcagtatgatacaacacaggcctgagtccttattttctgcaccacacccatcctatgctgtgctgtatgcctgtgacagtcggtagcaactgccaatcaacagctaggagacatgcctctgggcacatctgtgctgggtcactgaaagcttagcttctgagaaggtctagaggggattgtcttgattgtgttgaagtgaaaaaaaaaccctcttaatgaggctagagctcccatgctaagtagaatgcagagggcaaattgaacatcagtgtgcatgagtttattgctagcctcttctgactgtggatgggcataatattacccactgtctctgtagagcccctgactctaaattccatgccaggatgggctgtagcctggaactgtcagtcaatgaacttttttcctttaggttacttttgtcatggtattttattatggaaacaggagaagaaactaagacaatgcgaaagacctcaagtatgagttgagttacttctacatgttggatgttatgagaacatacagattgggttaccttaaccaatggtgagagaaagtaagcacacaggttctgtagaaaggtggactgtgatgggcgctacaaccaagattcagtcagagggctgtgcggaagaggaatggcagcatctatagcatctatttggaatcagagaaatgctcatttactcaaaaatatatattaatagcatgcaggaacacctccccccacctgtgctgcttctccagaggagggaggcacctgcctggatggtcatgtggccatctttagagccatctcttagttaatactggccctgtgccctccgtgtttaagctgctctttgtctgtgagcccatgcagcctgtggttaagtgctcctgtgtagctgatcccttcatttattccacaaatatatagtgatggagatgggctagtgctggagcttcatggaagaagatctggatcagatttataatccagaatgcagtgcagcatcctctagacgtaattgcagaggtccagatgggtttctctggtcaactagttgtatcgtcccgccccatccccccccccccccccccccgagcagaaggtactccagggatctgaagaaaggttattgtatatattggcttctgggtcacaaactaatctcccttcaggagctcattagcattcacagccagctactcccctgttctccagtcttgggaggaaataccgactgtgaagtgagagctactgacactgtttgcccttttgatctcttccaggatctttttccctggaagccatcccgtccgaggtgtgcaagtgatgaaagttggcaagctgcagctacatcagggcatgtttccccaagccatgaagaacctgaggctggtgagtgcgccaagacatgggctctgccgagcgtaccttcctctagctgttgccaggcctctacttggtgactgctgagctctgtttttagcatgtgggcacacacacacacacacacacacacacacaacacacacacacacacacacacacacacacacaccgcccaagtgtgctggtaaatgtttaacagccatctctaaaaacatttgtatcacttgccaatttctgtggtataaatgtacccaaatgtaattcattttacactgctagtatagactcaatctgcttgtgtattatttgtgcacgtgtgtgtgtgcaggtgctagtataggtgtgtgtggaggctagaggtcagccaggtgtcattcttcaagagccatccaccttatttggaggaaacatggatttttctggcttggagatcactaatttggactgtgagtgtcagggatttgactgtctccatttcccagcattggggattacaagtccactcatctacccagcttttaaagtgggtcctagggctcaaactcatgtcctcatgcttgcatgacacttaacctacagaactatctccccggactcctaatcatgatgattttaacaggtgctcttacaaactggtgtgagtctcagacaaccactacaagcatgccgtgacccacaaaccacccttctccacattctctgaacatagtatgtctcttttatggtaggaaagacctggccatcagtctagtgtctgcatctcccctttcctctctccactgccagaacagggcggtgccctttgtcaatactggcttactaacttaggtctttacaaaccatttcctctacctcaaatgtagctcctagcctccagggcctggcaggactctactggtccttcagggctcagctccaatgtctttgttttcttggttcttacagctgtttctggctctgccagtggagcacttcctctatttcagtagggggaccactctcccaaccccagcaatctggaagtcattgttaccgtccttgtaactaactagctcagcatcaggcaaaatacctagagctaagaatatatttgttgttggagaaaggggaagggaaggagtgagaaaagtcaatacaatcttagcagtaagattaaactgaaaataaagacctgagttactgctggaatgcattgctaaagggtcacttattttcaccctcttaaggagtttctctgcctggaacagctcagaactctcctggcttggccttcccacaccttcagacttcctctcagcagtccatggcagtcaggtgcttacctggtccctgcactggtaggtcataggagacctggactagctttcctggggagcctttggcacctgaagaggtcttctgggacccactattcatgtttcagaagggtggtggtagaatggttaggcaccacagcaagccttcccagggagtgtctagggactgactgagcccatatcttggcatttttagacaagaaaggtgataaatgcctaaagggttattaagatcatcttgcattgaatgctagccacattggctgtttctgctccctaagtgacatcaggtgtcagccaatgggaacaacactggagcttcctggaggtgtccctctctttcccttagtccttgggcatcttccccagataaatgcagggataatctcctgcagtcttggggagaatgtcccgtctcttctctgttcaagtacgtgtccaccagttagtccagctagacagaaaacacttcctttggtctgctgagtgaaggctccaaaggaaagcaacagtgtagtgaaagcttcccatgtatatcatgtacccaatccagggttgtcatgtaagttgatatttcataagtggtcagattggcccttcagtttatgtggggctcatacatacgtggttatccttggtcctcatgacagatgacagctgtaaggctagacaggtgtttccactcatgtttagaaactgaaacactaagttgcagaggtgcaaaagcccatttaaatctcttagaggcacaaccagttctgtgtatcccgcttaattcagtatgagttgctgattaaataacactgctattctgagtgagacccattatcatccctacagtttaatggaggaaacagacatgggaaaagtttttaaaaatctactctagaacgcaaggctcctcccttctctcaactgtcccatttaagtaggtgattctctctggaaacactcagcatacagaaatgccttcaagcccagctgaattcctgatgccgtttaggaggcaagctgggggagacatgagagcatgtctggctctcttccgttcttcactgggggctgagtccttgccgtcattggagcacttcagctggggcatcaagtccaccagggtgggcttatggtgacgtggcttgtgtgggagatgcaggccatggccagagccttctgacgaccctcatgttgcctgccacccctgcacacttgtcagctcacccactcttgcagacagaccccacagcgcaaccacgctggcctccgctccagtctgcaccctgctttccagcccttcacaacagccaaatcatgcaattttactcttcccatttcttacctctgtgctcatgttcacatttaggaatctgatcagagcctctgcctcgccagaggcaagtaaacaggccacagtcctgtatagaagccctcaaagcctttctaagactcttcaagtgtattcggcccctctgcacgtgcagggtcaggacttggcatggggtttggcagggggtggggaggaaaagaggacaagagggaaaaggacacgggacatatgctataagtgccactgatgccatcaaatctcctggctctgatacttaggaatgtcgcctactaagttctaataggaaattataacatcgggtgtgtgtttttaaacaacaagaaaaaggagatgtagctagagagagggctcggtgtttaaaagtgcttgctgctctcccagaagacatgagttcatttcccaacacccactttcgaaggattacaacctcttgtaactccagcttcatagaattcaacgccctcttctgatgtctgtgggtccatgggagtgtgctcacatgcacacacacactcacacaccacacatgcacccaccacactacacacacacacacacaggtttttaaaatcaaatgttataaaagaggggaaaaagaaaaaaatgatggttgaaatgcaagcatagtgattaaatcgtattaaagcaagcatgcatttccctattagtgattctaaactccatagtggcaaggagctgggtaggaaacctatattcgtgcctcatgttgccaccaacaaagtcatcctcccacccccttccagagtggtgccaggggcagccagatggaacaaggtttgcataaattcagattctcaaaaagttctgatttcagtggaaaatcactcaccatacaaagaagcagtcttaatctttcacagcgatcaacagatgcctgctttgcgatggcagatccattagaattacttgagagtgattttacagcagccattatcgagatgcttcagtgagcaattacaaatactatccaaacaaacggaaaaacatagacagtcttggtgaagagagagaagatgtgaaggaacaaacagatttaagagcaataaattcaggaacccagcagtggaagagtgctcacagcacggactgggaaactcagacagaaggatagaactgaaagcaatggtacaggaggaaagcataaccaaagtaaagctgagcaaggccttggggacccggggaaccagtgaccagtaatgttaggcatctgacattacactcccagagggagaagaggagcagggcaaatataaaaagtactggaaacaatagtagaggcatccaaactagaaaaggtaagcttgatctctgtccaccaatgacaaaactttatatgttgaacacacacacacacacacacacacacacgcacgcacgcacgcacgcacgcacgcacgcacgcacgcacgtatgcacacacattataactaataaattaattaaattattataatctaaagtcaacattcataggtcacttgttctataaactaacaaaaaaagaaactatttccataaaatccttagaaattaaccaacatgatgaaggaaagacattaaaatataaacagtgacatctcatgcatatggattggaaaactgaagatatcagcattgctcagagttatatacacattcccagtaaaagccaatgatgtatttttttttttttttacaaaatagaaaaatcaatcttaaaactcacatggaaactcaagagacccttatccctaacaaaatagccaaaacaaatgtctaaaaagaaccagttagggaagtcaattcctgatttcaaaacttactacaaagctatagtaatcaaaacagtgtgttactggtaacagatggatacatagaccaatgtatccatagacaatagaaatccagaactagaccctcatacatatggaaaagtaatttccaacagcaccactcgctaattacatacaacaagcatgtgttatatgattccgcatttgtgaggcacctagaacagatgcacacaacagaaaggagagcagtggttgtcagggtcaaaggggaacacagagggtaggtgctcattatgtaagagacacaacctttcagcatcaatcaagaaaatgtcctacaggccaatgtggtggaggcattttctcaattgaggtttcttcttcccaaatgactctaacttgctatcaagttgacatagctgactcgctggctaacatgataaagcttgggatattacctttgtattttactacaatagttttcttaagtgatggaaaactacctgaatttgacaaaaaagatataaagctaagcaaatccccccacgcccaaattaaacctaaagacattctcaccatgattcattatttgaatagaattaaaatcccaaacaaatcctcagagtagcaagaggctaaaatgagtccttgctgttaggggaagaacaatctgaattagagtgtttcaccagaaaccctacaaaacaaacacactgttttcaagtgtattaggaggaaagaattggtaaccccaaatctgaatccagcaatagcatctgtcaatcactaaaacagaaatcaagctagtcacagctgtaggaaaattaaaagaactcatcaccatctcatctaaaagtattgccacccaaaagctctaaaacaaaagaaaaacaatagaagaaatcttgaagcatcaggaggaaggactacaataagcaaaactgtgagtaagtagattttccttctccccttcagcttcccgtgttgacagttgaagccaaagttctaacgccatctgaggtggctctagaagcatgtggtgaaaacagctggataattacattccaagggggacagtaaaaaggatagcgagaaggggggcctctgcccctgatcgcaaccagtaaaaatgaagacacacagagactataacgagaggggggaaagggcttaaagcagccacttcttcaaaagctgtgtaaaggatgcactcaaagacaccacccatgggttacgtagctcagttggtggagtgcttgcttagcgtgcaggaggctggggtggggatgggggttccatctccagcatctcattacaggagtgtgtggtgcactcatgtaacctcagcaccagggaggtagagacagtaggatgagaagttcaaggtcattcttatttacacagcaatttcaaggccagcctagaccacctgaggacttgtccctacataaataaataaatctttaaatgacatgttaaaagacagatatggtaacagaggggattccaaaaaaaaaaaacagacacagaaaaggtagaaaaaaaaacaaaaaaataaagttgtatatttaagttctaatgaagtagtaattacattgtgaatgatatagtctaggcaaattatctaaacactctgaaagtcaaagattagtagaatagatgtatttgaaaataacccaagtatgtgctgtctataagaaactctctaaatataatgatatggatagactgagagtaaaaagaaaacacatgaaaacatactcaaaagatagctggagtgactttgttaatatcacatgagtagacttcaaggcaaggaaaagtttcctagagaccaaggacatcatctaagagaagtgtagtcatctcctcaaaagctgtaataatactacgcatgcctgtgccgtgccacactgtttcaaacagtgaaaacaaaacctggtagggctctgctgtggagcctgaggcaggaggattactagttggagaccaacgtaggcaccctagcaaggccagtctaggtagcacagcaggactctgtctcaaacccaaccagaccaaaccagtagatctgaaagaaaacagaaaattgcaacatgaagccgataagaacaactagacagaaaactgacaaagacagaggaaaatttattactatcactaagtcagaccttagtgatgaacaaaggcggaatagaagtcctttgcatgtatgtacagagcacatgtcaccgtaaaacacatgccacacactgaaccattagacaggtgtcaattaatgtaaaaggtttgtgagtgtaagggtcagacaaagcaaactctctgaccctagtggaatcaaagtacaaatcaaaaacaatacttggaaacaaaaccaaatttccgcctccctgctctgtctggtgtagtatgtcacacagtccactgcagcccaagttgtgctgtaagtttgatgacaccaaagccctgggaatatgtatgactccttcagaggcctcaggtactatgtgaatacttactgagttggttctggagagatgaaaacctaagaacaccctgcagagggtctcagttcagttcccagcactcacatggtaacttacaccacctgtaactccagctccaggggatccattgccctcttctggcctctgagaggactagacaagcattcagtgtccatacatgcatccaagcaaaacactcaactcataaaaataaataagcctttaaaaacattattatattgacagattaaagatagtaacacaatagcaactctgcgtgtgtgcacacaggggtgtgtgtgtgtgtgtgtgtgtgtgtgtgtgtgtgtgtgtgtgtgtgtatgttttgcctgaatgtatgtgtgtgtatcgtatgcatgcagtcaccacaaggccagaaaaagacatttgatctcctgaaaccagagtcacaaacagctgtgagctgatttgtgggtactgggaactgaactcaggtcttctgcaagagtaataagttgttccatgttcttaaccattgaaccatcagtccagccctgacaatagaagctcttcctggcatggtcctgccaccaacaggcagccctgagcgccccacatctgtaacccttcgtcctgtgggcatcctagctctctgctttcacaacaagggcccagacttactcactggagctgcctgacagtacagcgtaaatgagtagacaggtggtccctcccaagggtagcctgcctcccccaagcacattcccctcaaggggaactgacacttgcagtgaacctttgaagatgtagagtggaatggtctgcagggaagctgctgagcttgcaggggtccttggaggtttggggggttcctgctgcccatcgcaaaggggttcagtgactcgagctgcttgtggacatggctgtactttctgtcccctactgaattcccaggctgcctccccctgcacacacactgctttcttcttgggatgggcagaagaggaaaacttgcttcagtgtccccctgcggggacttgatctaaaggttcttatcttgcatgtgtttcttttccttctgatttttatatccatatttaaatcacgctcggggaagtcatttattacattccccaggctcacagtagaaagcatatgagatccttgataaacttaatatatttatattaaaaattaataagaaagccatattgtttccaactttaaatcataatttgatctcattcgttttatttaatacatggccacaattctaaaattgctttaaaaaatatgatgagatggaaatcagttctgggggccttttctttatttctcagacagccctgtgcctctcatgtggcagacaatctacattgccatttccggtgtgacatttagaatatgtgcgtgggtgcagcacatcccactggaggcttccaatgaatcctctgttcctgactgtatgcaggccccttttaaatgctaccactaaaaaaataaaacttaatggaaagagagaagctttccccaaaccaagcctgctcggattttatatttccttaatctgttttatacgccactacaggaaattaaactggaattgttctctctgacacacacgtgtgtagcatttgggaggctctgagactcagagctcccggcaacagttgctctggcttgtccaagatttactgcagcttcattttgaggggtgaggtgagaagaagcattcttctccttccagctaagctgaagaggtgtcccgagctctcagggctctcttctgtcccagacaggtactgggcccaggaccatggtagacacaagtggcatccgggacaagaaccagatgttcctccatcatcaggtctgccctgctcggcatgtcatgcaaatgcatgaaagttgttggcagagttagcattcttttcttcttctctcaatttctctcccatccatgactattgctcagagaaaagcatatgtattaattatatctaagctctggcttctatacaagtgatatacttttgtcctttaccccccccacacacacacactactatcttcacgtcagtcctcagcccccttcctgtactcctctcctctgcttctagccactgtggtgcatagaatccttgaacactggctccctgccctcttatgacactagtgttgaggtcaccagcaaatgagaggacacagcatggccagcatcattagacctgggccaccccagggtcctcaggctgtctaacaagctacacccaggagaccctgtttattctccatggtcactgcaatgtgcacagctggaggctgtcgcagacactggggtgggtcctgagagataaacatcccaccctgcccctctcaggccaggtgagttggagcagtttcttctgatcagggcatctggctggacattatcccctgccttcaggaagcagtctgggcagggtggctgtgagctcagatggtggcagcttccctgtctgctgggccctgcagccccagtgtggtcataggtcccaagtctccagtgaagcttgggcacctgccttgctgccagatggcagctctgccccttcagtggacaggaaaattctggttaggactggaactgcaggaggtcgtgaggaaggaatactggacctagaaacacgcttgggaaaactcagatcagccttacatggtcagggtgacaagaagacaacattgtcatttggccatcagtcacgtcacagagaggctcaggtccttcaccaggtggaaaaccagcagaaacaaccacaagccaaaccttttggtctgactaggagctgtgagaaccaccagcagagggcgctgtgccaggtgagccctttctcggggtggatgcagggccagccaggtcctgtttgcagcaggctctcccagagaacattcaccctcccctgcacatcatagctctggacaagctgatggggacaggacagccatagtggctttcaagaatttgccacaaaggatctgatcagaagcctctgtaatgacaccatcatccaggtctctgcctcagaccccagcatggccagcacagcagaggacccagggcagtgcagggaaagagaataaaacatgaggcaccagatgttgccttttaatctcccagagcttgactgcctgcaaggtggggcggcccctgctcctcccttccgtcccctccaacaagccctgccttgggatatgtgggcagtaactgcagcagggcagacctgtgcagattagcaagaaacaagttccctgcatctgccctggcccctcctgcgggcctgaccactgctgtaagcccagagcagcatggctttctttgaatgttctctttttttctcctaacttctaaatgtaacccccacctcccgcccctccaacaccacacacacacacacacacagacacatggtggggggcaggcagacagtgaaacagagagagagagagagagagagagagagagagagagagagagagagagagagagagagagagcctacttgttttctgttctttaagcctgaagagaacaccattacagaaacaggaggagaaggcaggagctgaggctgccagcagccagcagtcagaccgatttgttgccctgccttcctccttccgtcttcccctctgcagaggccaggctgtctaacttgatgcatttaacgagaacagagcagtctcactgtgagacctactcgttgctttccagctccaaaaatctctatggcttcaaggtgtgcgaacccaagaattctacccctaaggatttatctaaacaaatagcaaagaaaaaaaaaaggaaaacacatccacatacaaccataacaacaacaggaaacccatagctgcaagatctgtcatatcataatcaaaacaactggaagagacctaaattttcaagaaaagtttatgaagcaatgtctgtaactaaacggggtgtggcaatcatgctgactttggattagcgcagactggtggacagtggctatgactgcctggcattactgcacctgtattcagtggggtggggggtgggggagggttggcttgtcctggagcccattgcctggtgcttcacagtcaccagtgccacatctctggaagggtctttagaacccattcccaccggatgtggtagctttgggttccgtcccctagccccgccccgcctcccatcgaacagtgtgtagtgctgctgtttgggccgttcgttgctccacagcaaaccatccaaagactcagtagagccaagaacaacaagattatgttcacagttctgggtcaggaagtggatctgagcacagtgggaatggtccccagcctttccacggtgactggctgacttctgcctgaatgctggaggcatccgaagcctccctgggcacatagctggtgccttggctcttctgtcagtcatccagagccaccacatgtggctactgtttgaggttcgagcttcctggcagctcagaagctggtgtcccaggagcaagcaaacactggagaccaaggcagaggcttcttgcctttgagttgttaactgtgtgttcacaccggagaagccacaagctcagcccaattctcaaagtatttgaaaggttgaatttcgagattgattaacagtctgaacatggaggctaaagggatcactcgcatgccaccactgcactagcacaggccaggaagagagcgagaagtatgaggtatggtacgtagtaattcagataaagagttatcatgggacggcaagatggtatagcagatgaaagagcttgccaccaaacctggaagcctgagttccatccctgggacgcacagggtaagagagaactggcttcctcaccttgtcctctgattcccacaagcacaccatggcacatatatagccccccccccccacacacacacataaaagaaatatagtttttaaacctgttgttaggaggaagcagcataccatttcttcttttgtgtgacttactggtcttggtgagaattactcaaccccagcactatccacctaagcttgtgcattagtgtagtcactggagatcatggctgccccagggagaccagtacagagcccacttcctaagcacccaggcagcacccatgccacctgtattgtggcttcatgaaccacggtgctgccagttccttaaagactgctcaccttggggccacagggcccctagatcatcaggagacagtgagaggccaggtagaggcttgtgtgttttcgagctattgatctgtcccctttcctttctccttaggccttcgacattatgaaagtgacccacggccgagagcacagcctgattgaagatctaattcttctcctggaagaatgtgatgccaacataagagcctcctaaggacagccagagggacaggggaggtggcgcaccctgatcgaacgccttattgtggtcacacaacctgtgatgcttgctgtgtgaccctcctgtagaaaaatgccattctgtgtctatgtgggtaaatgtgtctctgtggtgtgttgtgagaagacctgttcgtggtagagcagaaccattacaataaatacaaatgagttgaaatgtcatctggcaacttggctttgcctactcatgggtgattttgatggttaagatctcagcattggaaataggaacttaccaaaaataggatgaaaagctgggcggtagtcatgcacgcgtttagtcccagcactcgagaggcagaggcagatggatctctgtgagttcaaggccagtatggtctacagagtgaattctaggacagccagggccatgtagaaagaccctgtctcaaaaacaaaagaaaacaaaaataggatggaataagttaaaacttcctctttgggtgtatatagagataattggattaaagtaatcatttccacatacattcctaaacacaagtgtatgtccatggtatcaagaagcaaagtctttattgtgttcttttatttttattgacatgtgttagttatgctaaatcatgtggttagctgtgatatctcagtatttgaatacgcatgtcgggcatgcacctacgagaggaccaatctggcttcccttttatttctgcctcttcagttccccgtttctcacaaccacccatcctaaccttcacacatgaatagaaagtgtcacacttgtttctgtccctggcttgtttcactccatataattttctctagttctatccattctgctacagacaacaggatttcattcatctttacagctgaataatatattccactgtttatatgtactttgttttctttgtgtatgttggtgatgacctaaggtagtgacagcctcagctattctgaatagcttcctagtagacatggacagacaagtatgtttggggtttatagatttcatttccttttgacatagacctagaagtgggatggctaactcccatggtagtcctattctcactccttagatgagcctccatactgtcattctgattttgggttcccaccgacagtgtataggagttccttctctccgtgttcatggcagcacttgttacctgtgggttatgtttgctttgttggctttaatagcattttaactgcatacatgatatctcattgtaatttcaacttccctgatgactgatgatattgattgggcctcatgtatttgtgactgtcaaagcagttgctcattttgtaatcagattcttctttttttaaattccttacatattataaattaactacatattatggacataaatcctaccttgggaggacagttagcaaacaattctctcattctgtagatcgtcttgtcctctgttgtttttgtgtgctgtacaaaacttcagtgtaattgttcatctgtctttggttttgtttcctttccttttataatcatatatattaaaaaaaattgcttagtccagcatctatgatagccgttgcccttactgatgtgtctccctgcatgtttccagttgagatcttgcatttggtctttgatccatcaagagctgagtattttgttcagaatgaaagttcagtattcatctcttgcatgtggtgtctgctttccctgttgaagaggccagccacacagcctgcacggtttgggaacttttgtgacgaataagctggttctaggtgtgctagctgacatctaggctctctgttctgtcccactggtccatgtgtctcttattactctatgatcctattgcgtctgccatcatggctctatagtatatcttgaaatgaggccccctgatgcctctagccgcattctttttgctgaagatagttttatctgtcccgagtctttggtgaagaagcaggattttgaaatattgtctgtattgctttatgataaataattacatacattattttatttctgagttcctctccaacacaggaatctttatctcagagcctaggactagttcatttcagacatcactagaaaaggatgtaagtctcaaacaaaaagaaaaaagatactgaactcagctctttatgtaactcttgtgagcattttataattctttgtgtatgctattattttcctaaattttttttctgtaattgcttgaatctgtggttcagtgtgttaatgggcagagcagaaagctctattgtcctacagtaaacagttctcaccactattcaaattgactggcttcctctgcttttgttgtcttttctatttcccaacccattggcctgtgtctctatctttctgctttagataaataacaaaaatattttccttgtccaaaaaaagttgagccttgtatggttcactgggcctggaagcagtgtgatccttcatgtttcagtgagattttgatagtaaatcaggctagtagtttgctgctggtgaaatggtcctcaggtaatagggcctccatccacaccttatgttagaggaatacagatgcaggtggtgaatgcagaacccaggatagcgaccctcagagggctggaggcaggccgacactgtcagaatgacacacggttgtctaactgagcctgaagaaacagaccttattttctggcagaggacgaccataaggcgggttgcacctgccaaacaaccactgcccatgggaacaatgacgtgtgcagggtgtcttatgcacacccacaagctccaaggccttttccgaaggatgcttttgctcatgccacagccgccatgcagccagcacatccctaagacaatgctgtccctggtaaccacagtagcatgtaaggataactctttccgccaggccacctgagcctacgtgggtgcccaaaataacacacagagtcttatattagttacaatgctgctggccaatgataaagacttatcttatggaggatgccagtggcatgtgtcctcttcctgggatcacatggcagctccacagagaagagaggaggaggaagagagcaatttcctgcttgtccatgcttatattctgagtctgcctgctatgtcacttcctgcctggatcacaagacttctctttactacatttcccagaatcctcctcaactcctagtcccacctaacttgcttccctattggccaataatactttatttatcaaccaataagacaaacagaaggacctcccccatcagtagcatacaaggtgagtatctgaaaactgtttcatgagtgaagaaacaagtctgaagtcagatgcactggaaccccccagatttaccaagtagctctgaaatgaccttgacctcagcccttttggaaggactagtttctacccagttcaacaaatatttttaagttattctgatatttccaggaaaagagaatacaaaggccaagtaaaacctgtgtgatctcaaaatatacactgtccaggagaacttgtatcagttagcttttactgtgtaacaaacaaccccagaacttagaggctcaacataatttttcttagctcagactgctgtaggtccgcaacttgaactgaacatttctgatttgtcccaggaatggtggttccatatagttattggtaggttgcgtggagagtcagagtggctaggtgatacggctccctaggttggctcaccagctgtgtccacataccaggagagtcccaagaacagtaagtctatcaacccccaatcggccagagcttttcaagcctgctttcatcacgctggctttagtcccaaaggtcaatgccaacctcaaggccagcttcaaatcaaggcatggtttcctttgctgtagaaataactatagtcccactgcagggcacaggcactgagtgggagggtggtgccatctgtggcactcaccatagcaaccctgaaacacttaataaatatcatgaaacccacactctgtgcttccagaaacagaccagaataatttgctattaggatacagatttttagaatgcccagagcctattggtgaaatctttggcatcctcctcaaatgaaaaataaacttcatgcattttggaaaaaaagaaaagcaggagattgttacattgtttgttcccttttaactcaccggggaaatgaaagggccccaagggaaagttgggagaataacttacatggcccatggacagagttcatggatagggtgctgtgcttgccaactttctgaatgaaatttatcagccactgatgatcctggattaagagatttgtcttcacgcctcctagagaaagtctgatgggctttgaaatccctctctgccagcttgcagggtatgaggatgaaggcaccctgtgcgcatccagttttaataaaaagcaaacacttaacagaggtaaacatttacccaatgaaattatagaaaaataattttggcaaaaagggaaatggccagagaacacaatttaaaatccatgtcaccggtggctgagaattgattgcggccccagcctccgagagactgtttcattaatccatagtcattgtagcggcaggcttttttcacatcagtaacttgacgccattagtcgctcctctgggatgagaacacattcaaactgaaaatgaacacgccgggcataatttatagccgtgccacatgaatgccaagagtgtgaggaggaagctgcttgggagtccactcgtggcggctactcagccctcacttcctttaggcagccgccagatatctgcaaaccacaggcctccagttagactagttgcagggagggaggaaattccatacaggaaccagatgtcttgaaaattcctccctggtccagtcaggagtggatgttaggctcccacaggggagcccactgggattctgcagggagagggatctggacattgtctgtggaacccgtgcaatcctcatgatggactgtcactgaagggagcttctggaggatgctgacccctcctttcctctgaggtctagaagaaatcaagccaacgcaagaacaagcaacacccccaaatcagggcacttcctcaacactttgggctttgaaaacatgaagaggatgatggagacagtatgttcactactaacccaaagcagcgggagccacggctcttcctccgtggtcacctcaggactccatcactcttccgtcccctctactaagggaatacatcctatccatcccctgaagtagcttttaaatctcttatccagtcccagaaacttcacaggctccatgtcatcggtcagctgcaggaaagatgcctccgtcctctcccctgctgtcctccccttcctcctccctcggagctgcagaggagcctccctcccagatgcttgcttcatcatgcatgccctcttgaagctcctgctcggagtcttagagtggctcgccattgctacccggggtctggtcttcccggacgtgagctacaatttcctgtccttgtagtgttctgcatgaacctgaacttccactccagctggactggcttcccaaccccagacctcagtctttggcatgtgtgtgcgtgtgcgtgtgtgtgtgcgtgcgtgcgtgcgtgcgtgcgtgcgtgcgtgcgtgtgtgtgtgtgtgtgtgtgtgtgtgtgtgtgtgcatgtgtatgtgtatgtgtgtatgtgtgtgtgtatgtgtgtgtatatgtgtatatatacatgtgtatgtgtgtatatgtatgtgtctatgtgtgcatgtgtatgtgtgtgtatgtacatgtgtatgtgtgtgtatgtgtgtctgtgtgtgtgtgtgtgtgtgtgtgtgtgtgtgtgtgtgtgcacgtgcacataagaatatcactgtaggttctgaaactagaaaggagaccgtgaggggagatggaggtctgagggaatgtaaggagagggtaatggaatatacatgtgtgacatgaaagtgtaaaggggacagaagtagcagaggagggtccacccgtaagtttatgaacccaaggacatataaaaatggcacagcgaagcctgcgactttgcatgctaattgtaaaccatttgtaagtagtgaatgaggggtctggagagtggttaagacactggctgctctttcagaggactggggttcagttcccaactgtggcagctcacaaccatctgtaactccaattccagaaggtatgttgtcctcttctgaccttcaggggtaccaggcacacatgtggtgtacagacatacatgagagcaaattttacacatataaaataataaaataaattatttttccctttaaagtaaatgtagactaaaaacctttaagccaaccttcactcctatgaataccccccaaggaggcaattgtgtggccttagttctctgatcttctttgtttctatatttttgtctaactttatggaagatagtctccactttattgtcacattttctaggactctttcagttccactgatattgctgtgaatttacaagaattgttgtttatctttcatttactgaaggaaaagcactaatgtttagtatttttaaaacgtattgtcctgttctctgacctcagcatatgacttctctgggaatatgaagatgtgagagaaatctcttttttccttgctatgtatttttctatcaaatgtcttatttttcttgtactgggctgcagcgtccacatctgtctctcccgggtctctctgtttataatgtaaggttagattccacacacctgctctgtacttcatggcttcctgttgcagagcacggggtcttgcagcaaagctttcccccgaaacagtgaaaagggatcaggtaagctttttaaacattggagaaatttaaaggcagcgcatgtgtgtgcaacagaggccagaagaaggcatcagagctggagtcgtaggtggctgggagctgcctggtgtggctgcttgtggtgaaacattacttatgatttattaaagcttgcctgaggattcaaaaagcaaagtcagccaccagttctagagatcagaaggtggtggcacacacctttaatcccaggactcatgggagataaaggcagatggatctctgtgagttcgaggccacccagggttacactggagtgaatcagtctaaaagagaactagaactttaatcccaggactcatgagagctattgaagacaggaactgggtctcagagctggcattcattctccagtcacactgatagattccccatccatgtggaggagagcatagcagtctgggattgtagcctgagggtttgtggagccaggatggcctttcagcctgagctagaggtaagagccagtgactagctgctttccttttctgatcttcaacttgaagcttggaccccaatacctgtctttgggtcatctattgtccatgctgggaactgaacctgggtcctctgcaagagtagtatgtgctcttaaccactgagccatctctccagccctgggttaacttcttggcctttctattcgtccagtgttcagcgccccttctgttttccagaatgtactttaacataggaagttaaaaattccagtgtgagtgggaaggggttatggaggccccatccccaggtgaggggctactaagttgacagccgctgggggagggagggtttctttcctttggggtgtctactggcaggtggctcattccccagtgggtaatcccacacccatgtgcatatgggcagcactaactggactctgggttaataatattaataaaataataggagcctaaagttgggaggagatgtgttgggggatactgagagagtttggaggagaaagttggaggatataattaaattgcatatgtgtgtgaaactttcaaagaataaataaaaagcactctttgattgtttccaaccacgttaccaccatccccaaacagcctcatctttcctaggtggaaccttggaaacaggaaccaccctgaaccatggtagccatggctgcacctttcattttcctgtgcaccgaggactctgtttcatccaacgtggaaccagattaagctcatctttctgcgtttgccctattttcacttagtgcaacgtctctggtgttcagctgctatcattttgctgcagtggtggtggtgagaaatgaaccacagagcttaacaaaacccatgcgggagtttattaggaagggggcaggggtgactaagatgaggttcatctttctgcgtttgccctattttcacttagcacagtgtctttggggttcagccatgttgtatcacatagcagagtatgtatgcaccactttccccaggcccacttctcagtggacttgcgagctgcccccaactttggacagttctgaagagcactgctgtgagcaatgctaaacaagtatcccaggaaggcttctccttcctgtacacttgcaagcattcttcaagttctttcggtagaatgctcagagctagaattacttggccatgtagtcaagccatgtttaattttggggtgaatctccatgctgctttgcacagtaatcaaactatttttgatctgtagcagcaatgcgcaaggattctaatttctccacatcattgcaaactcttgttgtttcccttcgttttctttgaagcaggggtctaactatgtatctccaacttcccgagtagctaagattatagatataagccacctaccacacagggattattggttttgttttgtttggtttattcaattgtagccaccctaatggatgtacaatggaatttattttgtgtttgatttccataaagatgagctacatttgacatctaacctgtgttttttaaaattaatataaaatatttttctaggatgcttaggaatttttgtttcaaaagataagactcactaaaatccaccagaggagcatgcccctgtagtccagctaccgagagtcggagctagaaggattgtttgagcctaggactttaaagccagcctggacaacatggagagacaaggtttcaaaaactaaaatccagtggaggggattattgttgagctgctgtgctatgctgcctgttcttatatttgctgggaaggctgtgctcctgtgctttgaagccccgaaggtgccactcaaggatgtgagcagcggacatcttcatccctcaccatctccaaggatacagtgaaacccacatcatgtacaatggctagcgcctttttactgtgggggactatttgacattcatttccatctttcagttcaatgtgtttcatgggtcacgtgatctccgattgtgaaggtgacacttaggacaattttttatggcaaattgagtcccaaagtacaatccccgaaggggtctgcattaataatgggccataagagcaccagcagggagcctgagccgggttccagcaatgaaatgcagttgctaatgtagcatttcaggaagacacagacaggagtgtgttattaagacgtgtgcaatgtcttctcctttccaaaagggatgttcgcattaccatagacacccaccggattacagaataatgaagacagaattatttttgcttgaactgggatttccctgtggctgagttaagaagcatgacccagcaccagtgaattggaatgacttttcttgaggaccaaccactctgattgctttgtttatgctctaggcgttcctgggcattttactttatcaatacgggagccagtgcctccagtatgtacatacatacatttgtgtgtgtttgtgtgtgtgtgtgtgtgtgtgtgtgtgtgtgtgtgtgtgtgaagcctggctgggtggtgcataagtaaaaccctgaccatagcaagtctgcccagcaaatgtttccctgagagtcttcaggatttgaacggccctgtgcggggcaacatactgcatgtcagaagacactggtagagtctgggctggtgagatagctcattgggtggagttgctggccatataagactgatgagccgagttccgtccccagaagccaagggtggagtgagagaacggaaagttgttctactgtgctctactcaccacgagtgtgggttttcggcatctctgtgtgtagcatgtgaaagctggattcttagagtggctggaatctgaggagtgctgattcagcatatggaaaatttgcccaaagcagaatgaaataaacaagaagcctcccaaagcaaacaaacaaacaaacaaaaaagaaagaaagaaaggagggggggaagcaaagaaaactaacaaaaaatgcattacacacacacacacatacacacacacatataatcatgggacttcactgtgggttgacttcttccatgcaggacatgaatttttaattaacattaaagattaaataatatccagctctttggttttctggtttgctttactttttaacatttactcttttttcctctctctgtgcttatgagtgtgcgagcatggatgcatgtgagcatgtgtgcattcgtgtgtgcgtccatgcatgtgtgcgtgtggatgtgtgtgtgtgtaaacagaaaaggtcagaggccaccctgcgggagtcagtactctccctccactatgtaggttctgggaatcagactcaggttgtcagtcttagcagcaagtgccaacacccactgaaccatcttcccagcccccagttttgctttaaagacatctgggtccctctttcttggcatttgagttcaacaaccactgaaaagtacatcaaaaatctgttctatgaaagaataggagctagaaaaaggggaggcagacagcatctctgcccaatgacaacttccggtctagctgtagatacacattccagcatgacaaagcatggctataagatgcatgtatggtgcgtgggtgtttcccatcctccaggagctcaagttgtttttctattgctgagctaaaacaccatgaccaaggcaactcacaaaaggaaggatttatttggggcttatgtttccagagaaatcagagtcccagcatggcggtggggatgtgtggcagcaggcacctcggcaggaacagctcagagctcacatcccaaaacacaggcagcaaacagaaaactcaaaaaggcacaagcttgaagctctcaaagcccacccccagtgacatactccctccagcaaggccacatgtcctaagcctgcccaaacagggccaacaagtaaggaccaagcattcagatgccagatgacatctattattccaaccaccactatctcttacagaaagtcccacaaagggacaagtgtccccttctcgattctgaaaccctaaccataggtacttgcagatttaactgtgctggaagaatgtgtaattaaatgcaaaccatgcagatggcaatggccctactccagtctgaccgatgtcctgctaagcagtgatgacttggacacaaacactgaacattgtgagaaaggacagagtgacaacaaggagatggccactgccagccaatgaatacagcatgagaggagcccaagccaagcagcacctgatcttggactccagcctcacacggtagggtaatcaatttatgtgctgacttaaaaaaaaaaaacaaaaaaaaaaacgaagcctaataaacgatattaggctgtattatttacttacctgtatttattaaaaaacaaaacaaacaaaaccaccaccaaagcactctggagaggaaacgactcattttagcttacttcctacagtccatcttgaaggaaagccatggctggaacctggaggcagagaccatgaaggaaggcttcgtgctgacttgtttgccatggttttcccagtttgttttattacacagcccagaaccactggcccagggcggttaccatcctcagtgatctgggccctctcatgtcaatcatcaatccagaaaatgccccaagcctacaggccagtctaacggtggcatttccttaattaaagcttcctctccccagatgactctagcttgggttaaactgaaaaaaaaaatgaaaataaaaaaatcaaccaatgtacaaactaatactggccacaaaccactattcctgtttggatttttttttcaatcctcaaaattatagaaaagctgtaaataaaggacaatttttcccctcaagttttcaaataagtttctgagctgtgacaagttcttcagactttcctgctgggcctggcagagcctccaaatgaggcaaatggcttaggctcagaaccgggatccatgcaaattctttgggaggaaatggaagtacaggcactggggagtggggggtgcaggaggggtgaggaggctgggtgtgggggtgcaggaggggtgaggaggttgggtgtgggggtgcaggaggggtgaggaggctgggtgtgggggtgcaggaggggtgagaggtgctatgcagtgcagacagtttgcttcatctctgccaaacacttgcagccttggagaaatcacctccatgtcccgtggagctggctttctgttccttccaaacacatcatttgggttttgtgtctaaggggctttatttatttttattcatatttatttaagtcttatgtagctgaaggtgaccatgaacttactatgaccttgaacttcttcctgcttacccctagggggcactggggtcgcaggcacgtagcaccacacctggttcacgtggtgcttgggattaaacgctggactttgtggatgagcacgcgtctatactccagcctgtttgctttaaggattgagggcaaaacctcttcagtctaatggaaggctctgagtttgtcagctctcctcttcaacatggctctgtctctcactctttggttgcctcctccaggtgtgaccaggctgcagccagctccagttggtgcaggcctgtctcttcctccacgtgcctgggaagcttcattcattctcccagacatgttcaccgtgccctcctggttgctctcggacacctgccccaccacctagaagctgagccgttaaattgctgtttcttgtttagctttctcctctgtgtgctccaagcctctggggaagaagccagggtcttgcctctcagtcaccacaggcattgactgagggcctcccaatcagcgatgcctgtttcttaagcactggacaccagaagagcaggtgaagaatgctctcaatccagcaggggaccggggacagtccacatgacaaaaggggaggcagagggtatgacagagttctcaggaagggacagctttcaaaagggatttctttttttttaattttatttatttattatgtatacaacattctgcttccatgtatatctgcacaccagaagagagcaccagatctcataatggatggttgtgagccaccaagtggttgctgggaacagaactcaggacctctggtagagcagttagtgctcttaacctctgagccatctctccagcccttcaaaagggatttctatccatgaagccaaagtagccataaacagggctttgtcattcccactgtgccttgccaggggcaggcacaaaggtttggacaatatctgtctcattcgctgttgattattggtttccagaaccctgtgtgacacattgcagctccaccaacactttaaaaaaatgatttattttttattaaaatgttatggacattggtgttttgcctatatgtaggtctgtgtgagggtgtcaggtcccctggaacaggaggtatagacagttgtgacctgccatgtagttgctgggaattgaacccaggttcatctggaagagcagccagtgctcttaaccactgagccatctctccagcccctaccaaccaccatcacttgagcaatgagcatgtgcccttcctgtagttcccacagccctctcccctcacactctccctgcaagactaccctttctccttggaactctccccacactaagctcccagctagcccctccctcctgccagtgctcaggatcaaagactatgaaagccaagcctccaccctagagttttcctcttaggtcctcaaaggcacaggtcagctgaagtggggccaggcaggatgtgaccggggatcagctgccctcaggactgggttatactcttgtcagctcaaacaagactcctgtgttttccttttgccatgctgaggaagcttcgtaagttttaataaggaccttagagacgccctcctttgcaagcagaagaataattcaggtgcagtaattagggtccctgcggtggccatccaggtggagggtcctaatgaggctttgcttccctgcccccttcccttccgggctctcccagagggagtttttactagagaaagaacagatccactgtcggggaagggaagtcctgtattagccagggttccccagagaagcagaaccaacagcatgcatgtggacagagcaggcagaccagggctctgctctcaacaatagactcgcacaggagtcggggacagaccatggcgcagaggctgggatgccactcagccatcaaacaggtgcttattgtgggcaaggcctcgcctgcatctacagcaccacaaaaataaataaaaggacaacagagggctgtcaccaaccctgagagagatgttcctggaggctgtggagaggaactactgataacttcaaccataatgccatggaaagggatgtctctccctttcccccacaccccttgagttttagtcattcctagggctagaagcacagttgtctggggtcaggactggcgtgaatgacctttccatgttatgggaagccctgacgtttctgaagctgtggcttctctagccattgtggttctgacatacaagcatccttttcaaatggttcatagagcacggtccactccccacatcaaccctgtaaaactggcagtgaacaggcgggcaaagggcaagtggtgaggagaggagaggagagaagaggagaggagaggagaggagaggggaggagaggagagaaggggaggagaggggaggagaggagaggagaggggaggggaggggaggggaggagaggagaggagaggagaggaaaggggaggagagggcctttctatctcgaccaatggtggcgcccaaggagtggggatgggttgagaatgaggaaagttacttaagttagcattgcaggattttagaaagggaaattcatggcacaggaacccaggggtggtggagaactttgacgatggtaacccataatttctcagagcataagataaagacttaacacaggccaagcagcttcttagtctcctctgctgcctctagggtcagaacatcccttctgagaaggagcaacagtcctggaactctttccttagccagcatgggagctgctcacaccaggggctcccacacctcttacttctcccaggcagggttgcacttagaatggattcagaattgcatgtgcatgggtggaacattctagagcacactgagctagacatcagcaacattagctggactcagctatgtccttacaatcctgaccactcaatgccacaccattctttgcttggtggggacccagagctgaggttccaagctgggactgagcacagccatctcaccttgcctctccccacactgtccttctcttctcttccctaggaactcaaaagaagtgatctcaggaactcaaggaatactggggcccacaggcaggaacccgcttgttcactgataggagcgttgccctttcttctctcagataggcaggcaatgtgaattagcacagtgactaaaggtccctttctccaagagtgtgaagcaaagactccccaattgtttgttcatagttgtatggaaagttgtcaaggtgttgcctgaagggatttataactctgtccctcagccacttggaagagctgggttgaaggaacaggtgggccctgggcaggccatgaggcaactttccagcctgggggatgtcatgtgatgacagttctgctgtttgtgtggcactggcctttaaagtactccacataaacaatgttttgtgtgtgtgaaaaagggacattaaccttgagacagtctgtaggaacgactctgcagaaaggaactagcatccatgacttagaagttaatgtgagtgactctgcaggaactcacaaccaaacaccaaacctaacccaacccaaatattatctccaacactagccctaacactaaccttaccctaaaccaaaccctaagcctaagcctaatcaaatcctaacccttacccaaatacaaaaacctaaccataaccctgtccataactaaaaccctaaccctgagctttaacctaaccctaacccaaatcctaaccctaacataaagcttaaccctaagcctaaccccaacacaaaccataaccataacctttaagctaaccctaacccaaatcctaaccctaacccaaatacaaaaacctaaccctaaccctgtccataactaaaaccctaaccctgagctttaacctaaccctaacccaaatcctaaccctaacataaagcttaaccctaagcctaaccccaacacaaaccataaccataacctttaagctaaccctaacccaaatcctaaccctaacccaaatacaaaaacctaaccctaaccctgtccataactaaaaccctaaccctgagctttaacctaaccctaacccaaatcctaaccctaacataaagcttaaccctaagcctaaccccaacacaaaccataaccataacctttaagctaaccctaacccaaatcctaaccctaacccaaatacaaaaacctaaccctaaccctgtccataactaaaaccctaaccctgagctttaacctaaccctgacccctaaccctaaccctaacataaagcttaaccctaagcctaaccctaacacaaaccataaccataacctttaagctaaccctaacccaaactctaaccctaacacaaagcctaaccctaccagaattcactacaaaaaaaccttcagactttgttactgctagagtttaggtattaagtgccccctgccatgtctgtgtgataagggctttgtccccaatctggcactcttgggagacctcttaaggtgggacctagttgaaagtttctatgtcattaggatgacatgattaggatgccccaggtgtccttcctcggggtacctgtcctgcttgagttcctgtgcccgccccactccatcatatgatgactctctaagaccttggcactgtgcttttggacttccagcctcctgaaccttgatccaaatgtgtttctattgttgataaatgactcatattctgtcaaaaggtcagaaaatgaacaaaaaccactgttgtcttaggcctgctgagcaaagaccagatcacagcacatgcctgcacactgcctgcatttagccactgaaaaatccccaggaaaaaccagacaggacagaccaggccttggctctgacacatgagaatacagatatgctctgcgacctcagagtccactgcaaatcgtggttctcaagccaacttctgccttcaggactcctcagactagagtcagagagtggggtgagagagagtgaggaagagagaaagagagagagagcgagagtgagagagagagagagagagaaagagagagagagagagagaattcccagagcataccatttcttttgtatataaaatttgccttcctttgatagctctgcctaaaccctccatgtcataactcacattttgtgtgtggctctatgctaagtcacagaagtcacctcctgcccctataagccaagttcagagacagatgtgcacgccctttgttagaatatgtagactcacaggtcaagaacttggtacatcttctaagggatgtgctgaccttgtggaaactcctttttgtacatttgtagactgaacaggcaagtgaatccatgaaacaggttaagaaggaagagtaagctgggcgttggtggcgcacgcctttaatcccagcacttgggaggcagaggcaggcagatctctgtgagttcgaggctagcctggtctccagggcgagtgccaggataggctccaaagctcacagagaaaccctgtctcgaaaaacaaaacaaaacaaaacaaaacaaaaaaagaaggaagagtaaactctctctggggccatcagggaatctttgattcattgttcagatggacagttgaaagcatggccactcaatgtgtgtaaaacgccctgtaacaatgttttattcctgttgttacagctagttcacaactaggaatttatcctcagggatgtgtcagagaaataaagaagtgattcatgctcaatgtgtctgtgacagtgtaactgatggcagtgggaagtgagcgaagctcacggtccatgactggggactgggtgtgtctatgggacccagtccatatgataaaatgttccacagctggcccagtcctatcgttagagcatgaactatgctgttccagctgtgctggtgggactgagggaaaacagattctgacaggggcttcatagtcaaggttatttggagtgagagagacagagacacacagagagaaagagacacagagaaagatgcacacagacagagacagacagacagagagagcatgcacaaactaatgacaatagcagcagtgtttctcattggtgtgagctaaaaggtgatttttatttcctaattacatctttacaagtccagttaaaaaaaaaaaactaaaaaataaaggtgcctagtggcagcacacctgttgtgccagccgttgggaggctgaggaaggaagggtgctatgacttcaatcccagcatggactacatacacagagcaagttccaagccagcctgggtaacagagcgggacttgttctcaaacaaaataccacaaagggttaaaaaccaaaaagcaaacccagctcctggctcccaccatggaagaaggaacagggtagttccagaattttgacaatgaaaaacaaagcagctaccatgtaccctgaaggcagatgggactacacagaagctcctccaggatagcagcacggtgacctgtcaatcacctcgtcccggcaggcggacaatgctcactgtgccatcatgtctctcctcctccttccttgtgctctagaaaacacttcccggctgaggcttggtcctgggcccttgctgcaggaaagggcagaggcctttgctgttgatgataatgctgtgtattgtcctgtcagcttatggtaactgtgtgtagtcaggcagaactctggaagcccaggatttgttttatcctggtgaccagaatgaaggttcataaaggtttcttcagtgcttacttctacagaggtgccagaggactcagaaacaccatgtgctttcgtgtcttagggagtagtgctaggaattcggaagccagggctggtcgggggctggaaggtctcagctgcggctatgtgtataataaaatagaccatgggcctaggtttggccctgggaccaagcattgctacccctcctctgtgaactgtgggctttgtgtccgctagggttttccaaatgcattcctgtggtaccttcctcaagggaccctgaagtttctgcacctccattcctggctctcctgctgcatcgtctccccaagatggttggttgactcactcattcagctggtattggctgaatgctcagtaaactacaggattggttctggatgctaggaaacaggggcaggaaaaactcagctccacagcatccagccatgtctttgtggccatactccaagtgtcctgcgtgtttgtaaggattttcgagaaatgccttcagtcagagcagaagatggaggccgcagacactgtgacagcccttatatagaatataaaactctcctgtgaacagcaatagcctgacctgctaattcgggataaaagacccttgcatggcttttcatgatgtcatagtcccaagggcagctagctgaccacagtgctgtggtagacagaatagcaaccggctggttggtagaggtcctccctgagaggaatagaaaagaatgacatcatgaatacgaaacattcccacaggctcttgtgtttgaacatttggtgctcacccagtggcatgatataagaagataatagaacttttggacttgaagctactgaacagtctggagggctgcagcctggctttctttctgcttcccggttggaccggctgctgccttagaaccgcttcggatgagctacactacctggtgggtccactatataccatgaagccatgagctaaaataaacctttcttcctttaggttgcttccgacagatacatggtcacacgtatgaaacaaacggaaggagtctggaaagatggctggccacacaggcatgaggaccagagtttgatccccagaatcaacccatgctttaaaaagccagatgtggtagtgtgtacttgcaatgccagctctgaggaggtggagacagaaggattcctaggacttgctggatggcctagtctaggcagcaagtttcaggccagtaagaaatcctgcctcaaaaaatgatgtgggccttgcccaaagagcaacatctgaggttgacctctgcccccacccttaggtcacacacatgtgtgtcccatacagacacacacagacacacacagacacacagacgaaatgcggatagcaacctagaaactgtgactgtgtaaaagacaacattgtttctgatgaccacactcactgtcctagccagtccccctcagagggcagatgtgaactgaggacaagatgagatgataggccatgcctgacccctggagaactgagggatggaggtctttgtggagtatcgagagaactggaagcaatcacctccatgacaaggtattctctgttccccaagctggtgacgtgcacagcaatcctcaggctcctgcagaaggtgttaccactacgacccctaatttttttcatatggtatctttggtgaccaggaaggtcttgtctaggacctgaggagaagaaaaacaagaggccttagggccccacaggcaaggcaaggttgtcagagcaaggtcagggatgcagagcagtcctgggcagaagcaagcacgtgtctttgtttccatggccaccgggcctgtgccctaggcactggtgcacccgatgaccaatgccactgtgttgacacctgcccttgggagcaggggctgccctaggagatctttatacagtcctgatcttttttctccttcttctggaatgtgcttagtcatagttgagacaaattccaatgtaatgagaaaccctgtgtccaggctcaagttatctacaaccacagcacacaccctgactctgtgtggcagaccccagaagtactgagctgagggagactctacaccaggccagttgactccctgggatggaggaccattcttgggatttggtgacttagccctcccctccatccattcctgcttgagtctctgacttgctggaggacagccccacacagtaggactagacaggtgaatcccagaggacctgtggggcctcgcctccccctccctaaggtgtagttttaccaaggtgatgtaccttggtccttgaattgcatctctcttgtacacaaaaggacctattgggtagagaaggagacatgagtctgggtagaataaaagtgaacatttaatgccaccatagtttgattcttttaaacaccagattttttttacaacattttatacctcatatgcatatgccacaaagtcagagaccgtagccagcaaacaacatcttcacaccagggaatcgcacatagcttaatgattccatgtcaccagttgatgagaactatagaattcaactcttttctggactgttctccaggcaatctgttcatatttaccatgatcaagccaacagctaaattttatatagttatgtaaaagcccatacacaaaaacacagcctgcaaacaggctgttggggacctgcccaaggcagaagagttaaaattttgactattgaacaaatgactgtgtttaaaaaattaacagcaaacacttgcgagctaggaacttaatttttaaaacagcaccaatcttctatccaggtaaacagtgactttgaaacaatgaccataaatgccaccatcaacttttaaaatgaaggttcacggtcttgtgaagttgccgattctgatacaatcaatgcacttgggcaggcctgtctcccatttcctttgggcccatctctacagagaagcctatcaatatatacatacatacatacatcactcagcgtggactctcacagccagagctggaagaaccgcaaagaccttgtaccacaatgtcctcattttacaacttagaaaatccgagttccggaagagctgcttgtgtcccaggcaacaggtaggtctactgttgaagacagaattggactgggggcttttgtcatatgctctccgtctgtgttacacaccctctgtacagacacacccatatgtacacatactagcacagaggagcttcgtgtgattgtgtacacactctgggtgcaaggtggtctaacagagagagtccaggtgcctgggctcacgtaccaggtctgctatgagacccttatgtggactgggccggtcagtgaccactgctgtcagtttcttcatctacatatgatcctcctctgccctggagagagcgtctcatttctttaaagcatgtcccaccattacaccattcctttccttttctactatcccaggaaggcagcttttatgactcccccacaaactgtctacagggggacccaaggcccagcaaaatgcagtagcccacccaaggtttatggctatgatggcaccagctgtggccccggctccctgcctcctagctccaggctttccgtcctcattctagctgcctctcaaatgagactactggcccaagcctctctctgcctctcagagatccagtgaggggacacatgccataagtattacgggttgtgagactcactaaagtgctttggtttctttagcaaatagatagctacaacatctattcaaggccaggacctcttggggatcttggggatgagtagaggctaacattgtcagtactttcctcggggctgtgtggagacccagctagaggaggctggatcctctgctactgaggtccatggaatctgctttccaaccaggtcatcaccatgccaactggaaaggaagaactttgtctcagttccattggctgtctactagagagacagccaagcacagctctgcacttggaggaggagatcccaccccagtccgtatccatcctcccttccctggcccaggactctgctaatagactttgctggagtaaagaaaacagaagagaaagacagacacagacggagcaagcacacacacttcaactcagaacacgtggagggcgttcttgaacacgatgcataaagacatccagacatgcaagtggtgatacaggacaacattccaaggttacaagtcaatgataatgtctcagtaaatcaagcctggcagtgtaggaggctggcagtgtggagaacagagacaggaaggctcctttgggaaaggtcattctaagtgtacataaagcagatgcatgactctggggttgaaacactcacttccacaactgtggcacctgaaactgctgtatgtggagaatgtcaggcttgggcctatccacagtgccacactgtgttcaacgttgtgacatcagctcaggtttcgaataggtgcacccctaagtatttgtttgtttagagatggataaattaacttttctgtttttggagaggatttttggatttgagagtttcttgtgttagaattctgcttttactcttaaggaaataatgtagaatttgtcatttcaaagtgtgttctagataacacaccaggaagatggctaaaggatgcagtttaggcattgttttacaaacagctttgtaacgttgtaaagtggttacagacatttttcagaagcggggagtggtactctatataatataaaagaacactgtgtttctatcacttcaaaaaatagaaaaaaaataaagtagacccattcaccaatcgtctgtgaaacttgccctcagcagtttaacttggcacggagaacagcgagctgtgccgacctctcccactgcggggctgtcacacgtgttagcattgaggacccctttttcagtgcagaaagctgggccatgatgttggcagtggcggggaggctccagggacaatgacagtggatggcttagtcagcatcaactcgtggaacacaggagtttcaacctgtgtctaatgggccctggctttgggtttcaaagataaactaccctaaaagggaggaaatgtttttgcattatgtccagggaaagaacaacattccggaaatctgttttcaattttggaaggaactggttttttagtaatttcttttacagactagaattcttggtggaacaaggaacccaaaaaacattcacttcaggctcaattacagatcagcaaaggccatgtttgcactgtgcaaatggtgggcttttgccaacccaccttctctatcaggaagtcaagggcagacagcagttttgaaatacaatatgaatgagctcaaattaatgaggggcatgaggctatgaagggcagaaaaggtggctgttccctgggatgtgaggtccacccccacgtggccgatgcagcaagcacaccctgagtgtgtgggtccttctgaagcacctccctacacgagagtgacccttcccggacactagactcccagcttaaggcggatccatgaccaatggggcctggtttctgcccaatgaacatttctggtgcctcttttctgggcctgtatggtagtccttaccccagcctctagctcaggtcttctaccccttgaaggtcattgcttgggtcattgctgtgtcactaggggacccacctatgcatttgcagagtatgtcccccttgttcagaacagtaattggagttgaaaccacaagagcaagtttcaactctgctgagatgaaagtgaaagacagcttcctggggtgtccaggagagttccaggagaagatcaaagcttccagcgcttaggtattgaaaaccaagacaacccaaaggcaggcttcctgggaggagcaacaccctccccgactcccccaccaggagacgaactaagggtttcctctcgggagaaggatgtacctgtctcagatttgtactcagattcttttcagggttacatggctgcaaatgcttctacctcacaaagttctttgaagcagggctagagttgggggaaatagacagaatttaagaaaggcatatgtacctaaatattaatacttttaaaaaaacaacagttccagcctttctatggacagataatgaagtagaagttttttgatatcccctttgccctcttgggttttttgtttgtttgtttgtttgtttgtttgtttttctccaacccaaacctggagccgtcttacactggcactgtcttcagatgttaggactacttctttgtgcctaaagatctgcactcctgcaggcagcttatagccagggtagggaacaggtgcatcatgggatgcagggttctcacaagctatcagttaagatgatgcgatgtggtagattaagatgtttgcagtttactttggagggagacagggtattagaatgagcaagagatgcacactaattcacacaaatatctccctgccccacagcccattggatcccatgggatgccctgccatgtggatgtggcctcctgggaagctaacctgtcttggtaaaggaagcctagtaccattgccaagccgttggtgctgcagcatgaggttgtttggaatgtatgcaaacaggtctgcatgggaggcaactgaggtccactcccctaagagaacctgctggctgagggtctgctctctatggatgagtcagcatgatctcactccagcaaaggtactgggctctgttggtggcctgctaaaggattcactggggcctgatgacctcaggattaagggaaaaggcagcagggaccaaagccaagctcacagattactaatcaaatgaattctctctggagcagggaaaagaaatccagacatgctcacttttaaaaactttcccaaaccaaaacctttcatgaaaagcaaaacacagaagtatatttcaagccagcaatcaaaacagatgctagtagtattggcatctctatgggtccagaagcttccaagaacattgctgttaagcaggcccatgtacacatgtgttacgaggccgaggttggccctgagcccaggactcctgccgaatggccctgaggggcagctgtggaagatctggggagcccctgcttccccaggagacatacttgttaaagttgtaggatgcacagagggcagacaggctcttccagagcttagaccattcaatcaacagcttgggatccctcttcataagagtcacctcttagaaatgtatgtgcaaagcaggatgtgtgacccatggggctggcttttggtccacagagctgacctctagaacagtcaagatggtggtctcatctgtgccctgttctagtaaagggtcaggtgccatggccatggcactcagatgacttcaggtcctgtgtggtgagttctgctggccacataccatgctgtgctggaatacatgtgtccagagagagggctgatccagaaacacaaaggtctttctctttggggagcatctggaattgaagagttggttggtgggaaggtggggatgcagagttctctttctaaaccctgagcaggtatatgcaaacgcaggctgcgtcgactctgggacagcggagaattcttgattctccttgaatgctcatttgttccagcagcctatggtcagccgaagcctgaccattaaatgcctcagccctgcatccgtaacatggcccaacaagcctgaagggaggtgagtaatttgagaatgaagtcctcagttctagggggtagcaagatttaggtctccccattcattcagctctgccctgcatatccagggttctagaaattagggatgtgattcctctctctgcctcaggacatcaaagcttagggacaagcttcagaggctttaggacgggttgagagctgacctcttactagtggacagaacccttggtgacagaaagctaagaaatcctaaccccaagcttcctttttctaaatggatgtcaagtctctgaacccatgtaagcccaagagggtctcaacacagacaacctccaccttacataaataacaccacagaacatgaagacaaagaacaggatatactgaagccgttcgagatttccatccacaggctttggactggaaaggaacatgaacttgttttgagggccacagacacatgaaacaaacaagaacaggggcccaggtcagctagacccccttcctcatcaccaaagctcattccatgcatccatttcatgcatggccatggagctgatggctggcctgctgctcagggaaggtggcatctcctgtcccctgcccttctaaacctccctgggaatcacactggctcatgccaatgtagtttccatgttctgagtggccttagcagaataaccatgaaagacagttaacatttatttagctgcaatactgattaggaaataccgctacaaacacaacttcttaggaacaaacagcaagtcagaaccaagagaaaacgagctgtaaatacatttcaaaaactgggctgagttttcggttttgttgatttcttcgtgactagcaccatctggacacaaaaagtatgaacacaaatgtttggataatcataaagatttgcaaggcacttaatccatcattctgggtcgtcttgttggtgttttgctttcaatggcaatcccgcgtcaccctccccttcctcacaaccgcaagctaaagagtctctgccagtggcccttatgtacagagaccttccaggttcctcaaagtgctttctccgtcccacgggttttcccatcatttctttcttccacttgttggtgtctttacctttcttccctacagaaaacaaaggaaacatcgcctttcgctcctcgctcactccagacttgccaccaaccttcatccgcatcccagtgtcttgagtgttgccagcacagagggcctgggagggtggtgccctgctgaagtcctagggagcgagggactgatggcttggggcccaccggtccttatcggcgcctggaggtgatgtcaaagcaggtgaccatcatgagatgggccttgcagaagttgacccggctctccaggcgctctgtcacgccctccagtgcctccaggtactccagggaatccagctgcaggacttgttccaagtcaactgaaagagaaaggagctcttggagatgggcgtgctactcataggaagggctacctgccccacctcccctgggttaaggtcgcctgagttgtgcaacacgaatatcccctctcacctggtcctcggcatctgggcatccgctgaggaaaggcagacacacccatcatggattctagctccttaacattcagagacagttctgaagaacagagaggtcgtcgagaaccttcccatgcctgccccagctgcctccaacacagacttgtgaggttcccactctactgctctattaaccaaggcaagcagctctagggtgctgtggcagccagagtccccctttcaggagtgacgtcacctgagtgacaggcagatcccatcccactaggaggagcaggttcccattcctgtgctatgtgttgctgcccctcagtctgggaaccgccactctgctctttttgttggtttgcttttgtttctgagacagggtctcatgtatcacaagctggcctctacctctccatgtagctgaagcggcccttaatcttccagtctccctgtctctcctctctgagagctgaggtggttaacatcacctaatccagtttcatcagtctcactcactggccactggggggtatagacgatgtttaaaaactatgtattaataattaaaatcccctttaggctccaaagacaatttgagtcatatagccatgatgtcttccattgggttcaggtccatagcaccaaagatctttgcccactcccttcctcaggggcagaggtctggagcccctttgccccattatgacttggcagagtggtagacagctgggcccagttctaggggtcctacaaggggcccacatggggggtgcagcatggacagcagctaattggtatgggtggcctggcaggggcttcacatggattcctagctgggcaacatcacctcagctggcattatttcctaaacagcaacgcaggtggagggagtggtagggtccctaccctgcttctcccatccaccttgagtggctgacatacacaacaacacaaatgagttgaatgtgcaaaaccacaccctgctaggaggaccacgaggttctgtagtggagtggagttctctttgcaggggcagccctccatctagccagaaagggcccttcaaggttatattgctaataaggattgcggctacgaacagacccagggcccgtgcatctcatcccagtgcacggaaatcagagccttaccctactgtaagcacaacaggcaataccacaggccccactgtaaagagggggaaaactaaaattgaacatggatcccagtacatcaccattctagcagggcctgctacccatcagggagtgtcagcgcacagcctctttgactttttttctccaatcctgttttaaatttatctttaaaaaaaaaaaaacgatatgcatttccccccccttccatgtaaccttctattcactgtctttctcagaaaaaaaaatctgactcctgacatgtaccaaggcaggaagaaagcaattgccccatccaaccatctgagtcccatgtgtatggacatgtaagttcatttgcaacccagaaaaaaagtgagtttggaaaatgaagatcagtttcaagcctgccttgggaataagcatctcttgaaaaataaagtcctaagaagatggtgaaagtgggggtgctgcctaagggaaggccctgtgaccaggaaggacccagagatctgtggaagaagccgagtgacagcagaggagaatgatacaatgtctcagtcacattttagctcatgtcctcctgcctgtgttggtctcattctacctgagataaagacattattggtgggagagtttgtgtctttgtccaaatcctcaaccaaggaattaaccatgtgccatggaagcaggcagtgaagtacctactgccaggagcatctggctgactgaactcaggggataactgcagctattcccaccagatgccaaactcctcctctgggccatgatggctaagcactcatcccagcctagaactgccctgaaagacaggcatggcctctcttctttctcacactagggaaaccaagacccagagagtcaaacacttaacccaaagtcacacagccagtgtgtagcaaaaaaacattacccaaatcaggtctgtgggaccctgagcagagccacagagacaacccaaaatagtaggattctctgcccttggggctaccaagaaagagacagtgtgacgggggtggggagaagggggtatcactctcagtgggcagtcaggtgctggtagacctggcccttctgtatcagtttcattttccactctgtctttaaaccactctttggaacataattctaagatgctaggctccacctgtgaggttcctcaccagcagggagcaccaggaggaggtgacatggagaagagtgtctcaagacactcaggtagctgagggttgagggaagagttgagcaggcagctgggggagagagacttcgtaatgctgctgctgtatttatccatggacaaagtcttccaggattagtctcgtaccagattaatagccagggcaaagttaagccttattttaaagtaaatggaatggtcaggaacaaataaattagagaggaccggtagcattgtgaagagtcatcaagtggttagcatcacctgggctcttggcttagtggaaataactctagagctgggacttggacttccacggtccccgggagcagtttgagagtgacacattctagcctgtcaagagagctacagttctggcccattttaggcgagataaaccttgtgtgtgagtctgtggcttaggagccctcctgtcagtgatcttccaccaagtataggggagataatcaatttcactttcaggtgtttgaactgagaccctcaagagaaggcagctggcacaggaattcatctcacacaggaattctcactagcctgctgttgccctcgcctgacaggactgctgctctgcaggacatctccagcccatgggcctcatgcctcagatgcagacagttcctgtgtgaggctcccagatggtgttactggggaccacagtggtagccaggatggacatgcaccagtgggccttacattcacggagccacttgttggggtccagcatcaggtactgtttggttgcttccagctccttcatcagccactcatacttggctcggacctcggcgattctctgctgccgatgctccaggattttcagcttggcattgaagcatatcacctcctgctcacagaggaagaggtgggaagtgagtggggggagagacaggcagaggaccatctgctctgcctcagccctgcagcgccctccagcaggaaggccacgagaggagccaaggacaagagcccagcttcccagaagcacggtagggacccttgtgaccctggcaggccagacacccaactcctggagactactgaaagctgttctaacctagaaggcacatggcccctcaaaatgttggtctaccctagggtgtaaaacctcaaaacaagaaaccagagaagtccctcaacccaccaggccctaacacactagctcttaaggtgttccagaaaaggagcacacagcacacatcaacctctatggctgggcccacaactccctggcaccacccattgtccatactgagcctgggaaggccctcctgaagttctgtcccttagcgcggggcctgctggtaactgtgacccctggagaggaaatgacctcacctggagaggaaatggcctcacctggagaggaaatggcctcacctggagaggaaatggcctcaccttgctggcgccccctctccgtcgctgcagacgctccacatcgtcaatttcatagactttaatctcaaaaggttccccaagccccctctgggtgctcctcagggggccgtccacccagcggacccccgtgctgctggcagtttttctcacaggtgagggggtatcgagggacaatgctggaatgagcctccgcctctgagaacctaagacaagaagaaaccacggagacgctggtgaacttgaatatagatgattacaaagtggagccagaaataggttgataaccagtagtttactggggaaaagtacttaggcaagggagccaatgaccagatttgcacttgagcagaacaaacccagaaatgcttcccagtcagctcaaccaggagaaagagtgctgcgtgtgcacctccctcctccttaaacccttgttacataactctgagcccgcccaagtgggcgtggtcggcggcacctctaatctgggtttctccctacccttgaacataggcgtgcataggtcttgatgagcatccctcattagctgcagtcataatggacagcatctcccctcagcaagcagggctttggagccctgtttgaaaccctccagcctcacactacccctgcagcctcttaacccatcatttacttcatccaaagatgaacaaaatccttgattgacctttaggaccaccaacccacaatcccgtgaggcccgggtgttctagtgaagttagaagtgtccctgcaaggggaacaatgtcctggtgtttggtactgtacctggaggaccactgtaagtgctgatgtcagaaactatccaaggagcctttgactctgaagaggactacaagctgcaccccattatcagtcatcttcctctatgagggggggttggggggctgtgaacctccggcctcacacacaacaggcaagtaagtgttctgccatcgcttatgaagcttttccctatagacaagcctaatctggccttgtatataaagcatctcattggattcctgcaggagatgagacaggtacaaagatggcaagcactcttcctgaggtctcaggattttcttcctgtgtgaaggttcatgtgtgagtacaggtgctcacacacatgtggacaggtgtgtggtggccagagatcattcttcagccaccgcccaccttggtttttgagacagagtctcttattggcatggtgcttgctatgtagactaggctagccagccaacaagccccagcaatccacttgtctccgtgaccccagaacagagattacaaacacctgaccttgtctttattttatcccccttccttccttccttcttttcttccttccttccttccttccttccttccttccttccttcctccctttttttgttcctcccttccttccctttatgtaggttccggggatcgaatgcaggccctcatacttatgtggtaaacactttattagctacctccttaaaccaagaattccttacttcacacacatatgaaggccatgtattaatagccagtcactgtttactgccttgtggcactttcaggaggtgacagaaccactttgaggtggttggccccagtggcaggaagttaggtcactgggggaagtacccttggcatgtctcaaaatacaaactataaatggccaataaatataggaaaacgcttcatctcattagccaccagagaaacacatgccagtattacacagagtatgaatttaccctagtagggatgactcctggagggtggtgatgagatttctcagaggataaagctgctgtctgcgtagatttggagcattagttcgattccagagagaatcgattccgcagatctgtctgtcctctgccctccacatgtgaactttgacatacacgtgtacacatacatgcacacatgcacactaagcataataaatgacttaaattattaggttaaatttattagattgttattagggaaaaaagcatcgtgaggatgtaaattaaaagggactctcacatatcattagtgggaatgtaaatgaaacccgccactgtggagaacactaagggatagcctaaaagactaacagtggatccagaacatgatccaatccttccagttctaggtctgcacacacagagatgagatagcctatgaaagagacgcctgtgctaatatttttgtaacactttttgtaacagctaagacagggaactgaacccaggtcttttacaaaagcaacaaaagcctttttaactgctgagccatccctgcagcccaagaaaccgttgttgcctgcaacagtgagcgagccaaggactaccaaggaaggtataaattagtctttgaccgcagacagaaggggcgtggttctctgacatagatggaggaggacaaggtacagggctgtctcctcactgactgtccctatactagggagctgggggtgcgtttgcccctcttcacttccctctcaggacacacagagggacacttggtacagagtgaacatagtgaacactatctacaaaacaccatctgcacaccaaggcctctttatttttattgtgcacagccctcatctttatcttgtgtgagcatgcacacatgttcttgtgggatgctctcagtgaggatccctttctctcctcccctccagactcctgccccgcccccacacttatccctgcccacatccttcaataaagtgcgggccatgatctatgagaccaacaaacaaccctaggggcaaagcaaatgtctgtctcttagggtctaacacctctacagggaatagacgagacaatgggttgtttttgttttgctttttttttccttttagcccaatcaagccagctgacacccagcaagctgtcctgttatcctgtgtcccagttccagactctgtgacctgagagtcccgaagtttagccgggttgaacaccagaaaggcaggaggcacaggactgactggcccagggtggaataaaggaggggtttccaaatagacacaagatgaagttgggtccataagtagatacccctgaagtcacccctctccattttatccagctttgataaagctgttgctttcattattttccctgacagaagcaacttaagaaggaggagtttgctttggtttctggttcagggtatgtggttgggtgcatcatgactctggttgcagaggaatggaggcagaactgggcaaagtcatggcgtgggatgatgtgataattagcctctgctgtgtaacaaatgatctcaatcccagcagctgaaagctccatcatttaactcacatattcctgagaaaccagctcctggagcatcagtggcaaagaccttggtgtgccatgccatcatgagagaagcctagtcataggatctggactggtccacacatacataagatttctgagattttcctcatggtttactatctccacctcccaagacggtatttccagcttttgctgaactcactttcttccctaactacttacgttcaggttactggtgggatctggggtagtgctagcaacagaaagcaaagtaggacctggcttaatgtacagtccctagaactgcagtgtaccaacacaggaaagagccaatgataacacaaatcagtgttacagtcctgctcatctccatgaagccagagccaagacctcctggattattaagaattgtggctgtatagtctattacattttgaccagagttttcaccccgctatatcatgggttttcaacctgtgggtcacggctcccttggggttcaaatgacattttcattggggccacttaagaaaatctgaaaacacaggtgattacattgtgattcatgacagtagcaaaattatagttgtgaagtagcaacgaaacaacatatggttttatacagttttatggttgggggtcagtgcaacatgaggaactgtgttaaagggtcacagcattaggaaggttgagaaccactgctctagacggaaaggcagagtctttctagggcccacccagttcccttctggcacaggctggcccatttcgtattctctgtgactcccaggctgtcctcaagaccctggcatcacatgttccattacctccagggacctaccccaagaaacttcctgtaccttagggagtcagtcacttttctttcttctcctgatcatatattcaaaaaggttctctcaccgtagccattgcctcctgtgactaggttccatcacactgacccttctcttgtgtgaggaggttccctcaccctggcccttttattctgtgactaggttccctccgtcatcctggccctcccttctcttgtgtgatgaggttccttcaccctggtccttctcttcagtatctggcggaggctctgagaagcctctggcaaccttcagctcccatcctccattctcatcatgctccagccactacatttcttgatctcatttaaaacaaaatcaggccacacacggggagccaggcaagcatcagagccaacctggggtgctcccagttcaacaagggtccttagtcacagatgcatgtgcagtcctgggatgtagaccagatattcccaggggtcaattcatgacagtcaggaaatggtaacccataggacccacctatcaaatgtcaatgtttacacataacaaaaacccaaccagccaactaaacaaacaagcaaaaacacaacaaacaacaaaaacaccacagactagattggactcaatatttaaaacacttatcaccaatagaacaatatatgttaagtaactagataagaaacatgagccacattttagagatagactgccaaagacaactaacaaccaataacgaaatcaatcagtggtacccaatggcaccctgcaccttctcagtgttgaccaccaagcaggtcttgcagaagcttatggctaggctggtccaggcatgggtgtggcttggaaccaacatgcttccatggatgacttctcttctggcagcttctccctccaccccaaattttctggatgctggtggaagaaggccaggcctcctgtagtgggatgaacttcctcctgacaaggtccctgccaattatgggacttcttcaagcaaacagaaggaaagcaagaaagagaaggcacgaggataacccactgtggttatggcgtaatgcaatgatgagataaagggagtgaagtgtgatccagagggatgaggtcttgggggccggggcttggcaggtgcagtgatgattaaatcctgctcaccataaatgcctaaatggctgggctgacactgttccctatggggcaggttatcttcactctaattcagagcttgaggctacacagttttgtgttgcctaccacagagggctggctgggaactgtgaggaatcaatgaaaatccactcacacaagttcctcttgagagtttataatgactctccattgctgactacgctctatcatgtactcttagtatggttctacggagctctatagaacgattctgtgtgttcttcctgcatttcccacatgctcaggggataatgtcacctggctgtacattttctaggctcttgttatgttcattaataatgctccccttgaatgaaccacactatgtcgcagcaagtgggccatgcacttgctgctccaaacctgggctcccaggatttattttctcagcccccaaagccctccactctgtctgtgtaagcatcagaatccttcaggacaggcctttcccccacagccgtcttcacttgctttgattcgccggttcttgcctatggctaaaagcttccggtgttgatctgcagtgtgggctccgcacatggcagtatgtctctgttctctttgttatcactcctgcctctgaatacttcacgcttctcacaggctgcccagcctcccattaccgccagctctatccgggcggatggaggatgcctagccaatgaccatcagctgctgcagtaaaatcatgggtgtcccagaggccagtgtgttaaaggtgaggtcaacagagtgacactgtcaggaagcagtagaacatttgggtggtggggcagagtgggaagtcttgggtggctggggatatgactttgaatggaattatgggaattcagcttctttctcccagccaccattgctccgctatctactccctgctgggatgtgctgcccaccactggccccaaaccaagaaggtcaactgatggcgactgaaaccaggagataaaacaaacctctctcattttaaagatgatcgtctcaggcatcagtttatagtaacaaaaaactgtctaatacaataattaaaaagaagttcactagcataaggttttcctatggaaacaatgccatactattatttttagttttataacagtaatgtgcccagcagaaggaccacagccattatttatcaagtccatgattttccttgtacataagaaaattgaggcccagaaaggctaattaaaagtcacatagattatggccccaagtttaatctttttgatacaccatgctgcaagcccaacctcatgtgctattcaccagcgaggacctctaggaaagggcttgaatggtggtggcacagcaatgtctgatgaattctccatatatatcacacgggaatcagagagatcatggttatttcccagcaacacaattctaattcttttttagtaagaagataaccaaattgtcacaattctctgaatgtgaaggcaaccacagataaaagataacggccttctttgcaattctaaaccccagacacctcccatgccatcaaggaccggccatctagctaggaatttcctttaaggagtcttatggcgtctcttaaagaagttgttgtgatttatgttgatcacgtgtgacagccagcatttctcttaataataatcataaataagccagacaaggtcacctaacctgcaatgagcacatcttctctgcagtatccatcactgagccctcagtccacggtggctgagcacagagctctaatgcttgggacactctatattaaatcccatctccagcaccttccctggcatttttatgtcacaccattttccttcaatagccctctaagaggagtccctcagagggcagccgttaagatgggaggtgaccccgagcaaggacacgtgcagcgtccactgccctctctctgagctgttcctcgcacatggcttcttttcctggctgattcttttgcttccctgcttcatcctagtacctcagccaaaccactatattaagaagacttgactagaaagtttaagatagtggacgaataaagtaactgggtagcaacgcactaaattagagaacagaaactcactctaccagggaaacgcaggtgaaccttgaagcaagcctgacactgttctccaggcttcgaagaccaacactgagtaagcagtaataacaatgcctgtcaatcaagtgctaggaaggctagcatatttgtttcccatgaagaccggtgtacataaatattttgctattttcagtaactaatatcagtgcatttcagggctcctggccctgggtgataggccacagtggctgccttgttgcatcaagcacttgtcacttgtcacctcgtcttacacagggggtcttctacaaagtctgagacagggatgaaataagagctcagtgtgagcatggaaggctcagaaacacacagtagtaggaaattcagacgccacagcggcaacagccatgacagtgcctgagcctgcccagaatggagtgtccttgctgatcccttgtgctgtgatctctgatgggctgggcagatggatgagcctctctgtgtcacggcatatggtggtgggaaaccacaagcttacattgtcccttgagattggattctttgatcccaggaagacaaatggtttatgatgggcgttcagccctcatgtggactggtcccttgcagagcgtggggccaccgctggcaggaaacaggcaaaaccaatcccatggcaggtagtggaagcccttggactgttcctgcagcagctgctgggaagaaaaggacctgtctctgtgtgtcatcccatctcttaatcctgactaggctggtggcactgacatgcggagcaaaggattgagagatctcttgattgcagagcctggtggggcatacaggacaatgaacaggcaagatgggccacaaggacattagaccctgctgtcctcactcaacagaggtgcacacaggacaaatgattttatttaattaagaaaaaaatcctaagttcctgcacgaaggaactgataggggcaatttctttagcatctagtaaagaatgggtggtctcaagtaaaattctcatgctatctaaattattcttggtacctttgcctttgtctctgatgcccactcccaccccctgactaacttttgagctcttgtactccatggtactggggccactaactctgaccttggcctttttttccccccaacataacctactatcatgtccatcccaaactccagggaacacagcagtatctcagatgtgagggaccttctgatggcgtgtttctggggatggccaagagttcctctacacgcaggtaggctgcagaatgtggacacatattgtctaacacttagggaggggcatcgcaggagacccgtggctgttttgtgtctatgactgtcaccagtgtgcttggggtaggaatggagaaaagacctctcccaccccactttcagtgagatgaagtacaccgtgtccctgaaggggatttccaaggtcttggaggccaccagccccacatgcaggcttctatggctactagtcagaatggttggggtctgatggaaccctcagaaggctctggacatctgccttctcagcctttgaacagaaactcgtgcatgtgagggagaggtgagggaaagaaaaggaagcaaggaatgcctcctgacaccccacagctagcaccccccagcacagcactcaggccttcaggaaagggtctggggattatgtcctcagccaaggaaggcctcaggtggcaggaccctgagggaagggagcacaggattccagttccagtacctggaccaaccccttggctgatcaagagcagggaaggtgaggccctggaagccagatgtcactgaattcccagcccatgcccagcacctacctgaattggaccgcttctttggggtcttgagactcctgcacctccctccaacggagctgctgttctcgctcatggagtcctgggccgaggatgcgctgcctgtggcctcgctgtccctcatcatactctcatagccactgctgccaccgctgtggtagaacaaggcggtcttccccatggcaggtggcagctccccactcaggacactgctgttgtcactaccatgcccactgctgcagcggtgaggcttccggggaggggtgatcttgctgtagggtgagggcagcaagtgggcggctgaaggcttgtcctccgcgggagctccaccgcgctcctctgcctctgcccgcagctgtgcgcccctcgggcccgcgctgccctgcagcagctccgaaatgcgcccattgacggctcgcaggggcagtttggaagccagcccggagccccggtttctgctaagcgactgggtggaccaggacatgtgcttcccgctgggtggcagattggagctctggcccacagactgtggcagggacttggtggagaagctgagggttttggtggtcgaggtggacaggctgcgggatttgggactggccagcaggagcttgcttacggcggagatcttagactggctggccttgggagaggcccctgcagactgggtgatgccacagctgggtggtgaggcccctgtgctgcgacccaggctcctgccagtgcgaggcatggtgctatctttgctggcatgcatgcgggagctcacggatgacaggctttctgccctttccagagacaaacattcatagtggctgactgttgtcctgccaagagagttggttctgctggccagctgctccagcttggcgctgaagagcttactgctgctactggcatccttagtcttgctgttggactcctcagggaagcaagccaagaaggtagctggctggttcagagggctgctggtgctgctgctgctgccgctgtgctgagggctggccctgttcttctggtccaagctagacttgcggacaggaggcagaggtggtgtccctttgggccgtgccaagacacaatgcttgggtgaagctaccttcctctccagggttgtcttcgaggactggatgcccagagccccactgaagccattgctgtccgccaggcaatggtagaagctgtccagtgcctcgtgcctgtcagctttctgaaatgccctcgggaggctgcttgactttagatttttgttggaatgtatgggactctgggtcaccaagccggacagggccatctcacagccatccacaaccctcctaatgctgtcagtcacctgaaaggcagatgcctctccactgctgttgctcagcctgtcacctgagctgggcctgccattctgctcctgctctgtcttaacttcagtcgtcagggagcttgtggcggtctcacacctagccccttcctcacctggggaagtggtctcctttttcacctcttcttctcgttttagccaggggtcttcaaatttcatctctcttcttgcattggcttccttgctttcctgggactgggttgttttgggggctgcctttggggtggccgtggaggactcaggctcttgaacgtttcgggggctcatggcaatgcaggggtaaaccgtgatgttggtcttcatggggatgtagccttcgcagctgcttaggttggccgcgttggagatggtgaccatggccttgcccactgtggagattttgcagcctttgatgggagtggctttgctgacaggttcttcccccatctcagacaagatgagtagattgtcagagcccatctcgggcttctctctgcataccacagcggtgttctggatggtgttgacaaactccgaggccgggggttctgccatggcttccccatgcccgaagcatgtctgtgctatgaagctgtggcatgactgttcaccatcgctgcctgcgctcatctcactcagccaggaactgatggaagaacgccggctgcctgcttcccgagccttctcatccaggcccagcttggggagtggcaggaactgtgtgatgctcacctccgagacgggtgccatgctggaataacattccaggtcttcactgatgctgctaatgatgctgacgggccgggagcctgaggccagggcctgcacggagcagtcgctgttgaagctgatgatgctggtggggcggccactgtctagcaccccgctgatggtcagctcctccacgagtgtaaacaccagctcatcttccccattcagttccagtggctgttgcacagtcaccatcgtggtgctcagaatctctttcttggagtctgcaggaggaccttcctggtgctcatcttcaaccagagttccgggaaacccttcactcccagcagacacggatttcttcaaaatctggggactcattccaaccggaggagtacgcacatcaggctgaagcaaggactcgctggagaccatgccagagtctttgctcagggaaggtggtggggcagaggaaggcaggacgcccttctgggtgtagactttgcacctctgggagggagagctggggggcttgtactcggaagtcttggacaggctggcgatgcccagccgtggggagcccatgggtctgggcttgccctccacgaaaccacacgagttcagactctcccggctgctctggagactggggctctgtgagagctgggaggcactgtgctggctactgctgcccgggatgctccgaggagaggcaggactggggctgctgctgtgagtcacagtgggcacaggggaccgatttggctgcaccttggaggctggaatctccgtgctttccctgtcggtggtcagctggccactgtccgatgcattatcttccttatcggactcagagagtggatcgggccctgctgcttggcttaaggaaacacatccacctgcctgcgctggcgcaaactggatgggcagctcttcgaagggaaacctgctgggctcgtcactgccgtcaatgcagtctagtctttcttgcagttcggcaaacgtattgcacttcaggcagtccctttccgatttgttggctgcagcctctgctgcctccgcagggcggctgtcacccctggtcttctgtagggctggtacgatgggcacgaagtccggggggccctcgttgtcagtaagctccttgtcagacagggctgtgccgttgggcccgatgtagatgacagtgtcacaggactgctcgctgctggaggagtagtcagggtcactggacagtggggcaagaggaaactcaggatccaccgaagcccgggcatggaagggtctcagctgggtaggcctgcgcattctgccctcctcacaggagctttctcccccagaggagcttgacgtgtactgcaatgtgggcaagagcatcattagtggggagctcttttgagatagccctccctcctagggagcctgtgtcatatggcaggtgcaagctgctgactggccctaggctcttgaggattggcctgcggcggggccagtagtcaccgggctgtgcaaggacaccttcctgtcccattccatgggtatgtgcgcacagataatccccatttgctcgtggtgaatttgcagcacacttcttgggaaaggtggtaacctatcaaggccccacatgacttcccctgccttagaacgctgaccatgaagacttgcttttatatacatacagggaatatactaaggagaagaaggagaaagccccaagcatcactagttggcatatagtttttcccccaaacattctctccattttaccgctgtcctagctttcagctcagcacaacgcagactccagcagactgacaggagaacccacagcccaaaggctcccggacacgcaggggtagcagagccacacgagtgaggcattaactaccctctctggtgccagctcactggatgcagtcctcacctatgaggaccacggagaagactgattccttcccacccctcagacatttttcaccctgcagtggcaatctgctaaagtagtcccagtcaggggtcagggtggatgacccaggatagcatcaaccatggaaaggagactcaagtttctcccgtgttgttggtcagaaggctttttttttttttttttttttttttctgttctgagatggtggctgcaacagccacgtttgcagtccttggtgttcagtggagaatggtgttaccgatgggcttttgtgattcagttctcatccttaatggattctgcctcccacacaagagtaccttaccttagtcttcttcttcttcatcctcaagactcttgatgcgatctggatggtggacagggtctccgtgtagctgccggctgcagccgagatgtgtgcaatcatggtggtgcgacagttcacattccccagagactccctcagaagcatggtgagcttgctttccctgccaaacaaagtggattaaggctgcattagtgggtcatgcctcatgctggctgtcagggcaggacttcaggtttgtgcgtggctatttggttgtgggtggtggttttcttcctcttttttttaatggcatactaattagccttgctttgcagcatggggctatttgtagttggcagctgagcaagtgcttctaactccaaggatgggattcatgcaaacacctcccttggcacttctgtcctggccacgatgggctgttctagtgtgtctgtttgtgtgcatatgacatcgcacataatgaggcctgggaatagaaacaaggagaagggatcaggagaaaatggctttgtgaccagtgatctggcatgctatctgcacacatagtccttctcagcaagtttctgcacacaggcaatccctataatagaaaaagcatgctatgagcttgcacagaagtcccgtgtgtttacaacacatacaaaatccctcttatagcataaaggaatgctactgtcattgcctcccaactctgctatttggacccagtatcactgaagggaaagacatcggtattcacggtaagtagagaaatgcagacatagcccaaatagtcacttagcaacagaaagcacaactttctagaaaggcttcctctgggaactttgcagttgctatgtggaactactatcttggttagtgacaacaaggcctggggcaatatacaaggctttttttttatataaataatcatgtttacacaatatttctttgtgataaaatactatcaagagtgttcaataatttcctggccctgggagatatgacagtaggtgactttgatcttcggtctcacagtggtactgcctactgtcttctctttatcattcagcagctgatgagtctacaaattcagcctcttcatcttttcatagcttcactatgagctgtagatgtgcctttcaccatttcagaagtggcttcacttagagtccttctctctgcccgtatcatactattgatgcattgacattgaacttgcagccaacaagacatgaactcatacctgaatgaagcttatctaactctcatatcttttccatgaagctttgtgcttcattctattagaaagcacttcagtaccatgctgcgggatcatttgaaagtgagatcatggacagaaagcataaaacattcaaaagcacagaaggcaacatttaccctgtcacacacctcagtgaggaacacgtgtattggggactcagaaatttcccccaccctgtgcattgcccttaagtcaccatgaaaatgccatgaatattgacttagagattacaaaatttttaccaagtggtcagtgtgcaactacaggatctgcaaatgtaccccagttgactaaaccatcaagttccttgtgggaagtcttgctaatcagtgtgcgtgccagaggcacacactttcagctctccacaagactgtgcaaatcttcaggaaaagatcccaaatcaaataacatgacacagcattccaccagactgctgtcctgtgctccacatcatcccatgtgagatacagttgtagaccaatatttgtggctttttaaaaagagtccatatggttggaagaagccatgacatgtgtgtttcttggcaaccaacacctttgcaaccttgtggaaagaaagtcagcagaattgctagccaaacttgacacaggtctctaatcacaggggagtgaaacagaaaaataggtagctgtagcttgttcaaattcatggtgatgccttgacttggaacaaagacaaccgggaaggcaggtgaggaaggggtaggtgaccaaaaggctgacagctacagactgagctgaacattctggaggtaactaagaaggttccaaagagtttttaggatgacagtcaccactggatcaagactgaattgacaggaagagaagcatggagaagctcactgccatggcctcggtgtcaggctagctggagggagcaatgagatgggattcatggccttggaggactaattggggagcagcacaagggcaggtaatgaggcagagcttaacacacctgagaagggaccatatcactttcctcgaggcatcttttatgaacacagatcccagctgctgcctgtcctggccttgtatacattttaaaatgacgaagaaaagcagtcttgtttgaagaagaagataacctttttattagataaaagggtagggaaagaagggaataatgaacacattaacgttttacgctgctgggggatggaacctatggccctgaacatgtgacaatcatgaaatagaaccccgagccaaagaacatatttaattatgaacaactttttgagctggagtctcactgtgaacccctggctccaaatacacagagatctacttgcctctgcctcccgaggtctggattaagtcctgggcagtaattgttaaagaacacacaccgctttataacaggtgcaaacaaaccagggccatgcagtacaaactgggctcactgcctgttctcataaacagagtgttatagtctagttgctcataggtgctataacaaagctcacaagtatttacctggccctttgtaaaagaatgtgtctgtccgtgctgtagagtaatgacacatggtagtatcatgacataacactgaatgtgccttgggttccataatattctataatctgcatttgatagatagcagtctatgctgctcctatgtctatttagatgtttcatggaagagtagctaaagtcaattccacagacactggcaaagaaaaaacgtactcggttttaggaattgtgggaacaccaggccccagccattgtcacagctcagatctacctgctacatgcagaggctatcggccctctcgaagggactgcacggctgtccgtgtcgggtgaactaatcatctcattagggggtgcagctgctcatttaagggacatttatggagcaccaactgactcaggaaagagagattgactgtaaggaacccgtgattcagtcagccaaatagacacgtaaaaactcattatgaccgtattcaataaaagctaatgacaacagacatcagcaaaatggctgactacatacacctaccatgcataccctgaaagacaaccaaggccacaagtaaacaactgtattttgattaagaaaaaaataaccgaacaagggtgccagagcacagatattcagggcaaatacatagggctcacctggccccagcatctctgcctagaactctagtcaagattagcttagacacactccttcctatgggggcattgtcaagagggctgtggccacaccttcaccaacttggtcaaatgaagtcctcactacagaggacccctgcagtctttatagacactatgccataagtggagtccccctgctgagctactgagttactccagagaagtcagcactgtgcactccatccaggccctaagctgacttggtgccctgcctcacaggaacccagtgtctgacggagctgatggtgcagcccagtcctaagaaacagtgctggggagctgtcaccacctgccctccagaccaaacagctgtagtactctgcttccttggaactgaactgaacccctgaagtctgagctgctaagcctcctgctgtgctgcatgatgatatcattgtcctgaccattggcctctgggctttaagccacagctcagtacttgctggggtgtccggtgtaccacaactccgggggatagtgatactaccgtgtggcctagactctgggcctgagttgctgctgtgccatattgaccctggatcccaaattacatcaggccactgttacatgctatgcacctcgcccacagcccagtcagaagcacaacaacagcccaatgccctaggtctaagctgatgggtgtgtgccttgctgtcatcaaccagctttgtaggcaacgtggtcctacatgtagaaaacccagatgactctacaaaggaactacagctgaattcagtgaaattgggagatgaaatcaacacagatcccacagatatcagaggaaagcaaaggtgtctcttttcactacggccttttaacccagtgtaggaagtcttagtgaatgcagtaagaaagaaagcagaaataaaaatgggctggttgggaaggaagaaataaaactgtctttactcacacatgagaaaattgatatacaaaaatgttaagatgtcacaaaaataaaaactgatttaggaacaaatttaatcaagaaggtaaaatgtgggtgctaaagagatggctcagtggttaagagcacttgctgctcttccagaggtcctgagttcagttcccagcaatcacatgagttcaattcccagtgaccacatggtggctcacaaccatccataatgagatctggtgccttcttttggcctgcaggtgtacatgcaggcagaacactgtatacataataaataaataaatagatctttaaaaaagaaggtaaaagacttatacaccagaaattttaataatctatgaaagaaattaaaagggattcaaatgaataggaaagatactccagaatcatgggtaaaataattaattcagttaaaatgtcaatagtacccccaaatattatagagttaatgaaatacctatcaacaccacaacagagtttctacagaaatagaaaaaaaacccaaatcctaagtagctaagcaattacaagaaagagaaataaagttggagaactcaaaattcctgatttaaaattctgttacaaaagcataaacaacaacagtgtggtcctagaataatcaaatactgagcttagaaataaattcaagtatatatgtagtcaactgatttttggcaaagacattaagaaaaggctgcaggagaaaagagaatgtcttcaataaaccgtggtgctgagaaaaattggaccttaaccatacacaaaaacaaacaaaagatgaataaagacttaaaactgtgtgtgatgttcttccccgacactggtccaaagcaatggggctgttcaatcctgaactggaccccctgaaactgttagcccaaataaaccctttcattttcagttgcttatctcagacatgttgctacatgatgaaaagctaacacagaaaataaatatacatatgatgagcatttatggacttctccgagggccttccaaaacacctatgaggaaagagtttatatagctatgatttacattgcagttatgagtcagagcccgtgaaatctgagccccaacttcagcagtttagcactgcgtatttagggagataaagcctatgtgaaatttgggccacacgattccatttggtactagacactgctgtttgatttattcaattaaggtaaagtttatgctaatcaagtttcttactgtaaaagaccagctatagatggtgaacaatctcaaccaaagaagcaaatacagtgtaacttaaatgtgtaactaacagaacctttctagttaaaaatgcactctacaaggatggtattcaataagatgtatagcaactaagatgtttatccagtgtggagttgcccaacaaattgaatacattccacagaaatcttccattgttaacttattcaacagcccattccttctcacaggtgtaagtaaggatgccactcagtgatgaccatgacctagaatctaaattactctatgtatcataaatctccgttctgctcagtgaatcattcattctgcagccccagcacccaggtaccacataagaaatgtgaaagataatccacacactctgggtcaagactgaaacatgtttatagaaccctaaggtaatagagttgaaaagattcttgtagtggaggtcattgcatttcccaacaaaaggattgctatggagatgggtgatatgctttatgctgcaatgtcttttaacttgggaggactcaccatcttcccagggcagctcacaaattctcagataggcttaattattagaaatatcttccttatatttaacttcaatctttacagcatcaactgagggtcactagctctgtgctctaggatcccacagggtaagaataaactcattgttcacacgggcttttcacacttttaggggtatttatcatgtctttcctaaggggcctattgcttaggaacattgaggttttttttgattgctctttcaataccccctccctatcacctgtgtgtgtgtgtgtgtgtgtgtgtgtgtgtgtgtgtgtgtgtgtgtgcacatgtgtgcccagtgagcatggaaggccagagctttatgtggggtgttctcctcaattctccaccttattttttgaaacaaagtctcttgttaaacccgaatcttactgattcctctagactagatgaccagcgatgcccagggatctgcttgtctctgtttccctcggcttgggcagggtggtttccgtatgtgtgctgctgtgcatgacttgttcatgggcgctgtggactgaacttaaatcttcacatctttgcagcaagcactttattaactgagccacattcccttgctccccaggcatacaccttatcacctctcggctcaggcttaccgtcaatttagccttgtcccccaaagaccttccctttgctgtgagtcgtggaagataaactttgtggcagtcattagaaccatttttgtttaggggagagggagccatgcctgccattcttaaagaccaactctagggtttaggatcacggctttgggtcacaggtatctatcaattactctgggactggggtcaaccatgtgatgaattgctctatctagccacaataatagctgcagatgccatagttcatgccaacatcactggtggtgatattcagtgcatgctgtcacagcagacgctgggacagtgacataccctgaggttactggaagacttacatctggaaccttctcagacactgccccatatgtctactctgagggctgattatagacttcagtcttcctgtgtagtaagagccatgagtacttttactgaattctggaagttcttctagtgaatgtcagtggctcatggtacctgccaactacaaagttggtaccagaagtgagatgcagactcttccctgtctcctgtccttaagcccaaataaccagaaatcatgggcagagctgcatcctggcgacggtgccctcaaacctagagctgtctgactttcactggattttctaacgtgactctaagcaccttcatgatggtaactgtgcttttatttgacctgtatttacctagacaatatataagacttaatagctttagggcagaatgggaaagatttcataatgcattaatattcacttcagcataaccaggaatgtggaatgtcgtcacattaaataaaattggccccaaagaataaaaaagacaaccaatacagaaaattcgtagacaaacagaataataggtgcacagctgtcccttgagtcaatgaacttccagaaattgcctacattaacaaagtaagcactgctgtgaaggtgcacttagtgatgtaacaagaccctcagatgcaaaccgctctacaggagataagattgttaatctgtctaccttgggaccagtaaccatcaccacagctagagtataactactgctccgacatttcacattagctagtcttattatcaaagcttggctacagagatctgtacagtcctgacacttaggagctaacctctgcaatggtctatggcagctttatcaacaggcaggactaagagctgtctcaattatgctgcagtgtggctgccaccagtcttaaagatgagatcactgtactctttggaaactttgctttcttccaacttccatcatccttgggtcagtggtacatgctcttgatgtcggagacctctaatggcatccaatctggacttagggactgatgaggaatagagatgaagtcaagaattacgttgtcatggtaacctagaggcacttctctgattctattcacttctgtccttgcccttgggtttttacagaattcttgagaagaaagaaaacaaggctacaaatggaacctttgatgcaacaaaatcctattctaccccgtgtcttccctcaggtctccccaccattttgcttgctacgttgtcccatgatctcctgagtctccttagttctaagcttatgggtctggaatatttttattcttttgctttcctttgaacttcaatatgggtttcaggtagcaaaagcatgtgaagtatgtgttggaggtggtgttttgataagggtctctttttgtacctctctgtgatcttcctttttagagttaacttcagaactgtgtggagttggtagtgggctggggagatgacacagttgacagagttgcttgctgggcaaacctgactacagatctctacctccatagaaacgccaagcactgtggtatgcatctgcaataccagtcttggagaggcagaagcatgtggatccctgagctcactagctggccagtttagccatgcaatgagctctaagttcagtgagagaccctgactcaaaaactaaggtgtccagtgattgaggaggactgccatgttgacctctgcccaccaccgccccacacacaggaaaacaaacaaacacgagacagggttggaatgaaccttgtcttgtctcccagcctgtctcctgaccaatgtcctttgaagtactcagtttggggatgtgtttataggagagctgtggcatcctgatgccataaagcccaccactttctccgcattcttatctaaaacctactttcacttttttctaaccgacacggatcggggtcttatgaggttccatgagcaattttctaatgatcagtcccattgagtatgttttcattgcttacggccattgtatgtcttccacggagaaacttctgttaaagttctctgcccattgtttagttgcttttgttgctgtgttttaggacagccttataagttctgaatattgacagggtctcactatgtagtcctggctggcctgaaacttgctatgtagaccaggtcagccttgaaatcatagagatccacttgcttctgcttcctgagtgctgggattaaaggtgtgtgacaccgtgactagccctctctgaaagtatttttttttctcattctgcccattgatataactcttggcagtatctcttcatgtataaggaactgtttatccttgtgtaacacttttctagactcagattttaccttattttattttatatttgtggctcaaaatccttccaatatgtggtttcttttgtttaaggatacttatctaatatggtctttattacttgtaggtcacttccggtcaccagctaggaaatgtgaaaggccattttcccatccgagggtgtgccatgggttttcctgactacaccctgtttgagatggaggagaacttaaatttcgggagggaatgagggcagtgcttgttgtgatgaatgacttctgggtatcatgtatgctttaggggaatagcatcccagggttctcacaagatggactaacagcactggcgtgaaaaacaggcttcagtaattgggagaattgaaaaggcaactgggttgaagactggtttccaccacaggtgcaagtcaacattcacacactttaatagtttcagagagaacctgtgaaactccaatgaggaatgacaaaaaggaatgaaacatgtaaaaatgcattgtaagattacagattctagttttgcttggacacaggataggctgttgttgcatgagttttacaattctgctaaaattgggtaacaagcagtcatttatttctgggctgggactctgtcttggtggccaagtcctaacacataggaggccctgttccacccacattaccaaaggtaagttactgagttttacaatgcttctgcattagaaatgtgatctgagttcaggactgaagccactcccctctcctttccagaggccagcatagaatccaggactgcactcatgctaagcaagggctctgcctctgctcttcattcccagacctcctgaaaaagccccaatgggccagtttcccaaagtcctgctgacaggggagtcacaggttaggagttaagcacactctccttcattgggccccttcttttttggggggatggactgggaagaaggaactgggaaggggtgttggtttcccagtccaaactcagtgctttcccacagtgctatgaagggcactccatgggctggcagatgtcccaaataccacagaggatgccagcctcttatagaatgagggcaaaggtctattcttcccatatccagacccagcacagggtctgacagagttaccttcctattaacattcaaaaaagtatctaatggttaaacttatccattaaaataagccttcaccccatgaaattttctcaatttctaagacagtggttctccatctgtaggtcgtgacccccacacacaaaagttgcatatcagataattacattacaattcataacagtagcaaaattactgttgtgaagtagcatgaaattttatggttggggtcaccataacatgaggacctgtattaaagggtcacagcagcaggaaggttgagaaccactgatctaagacatcttttttttcttgttgtccacaggaactagagtcacaacaaaaccaaagcagatgttactgaactggggctccagtgagcacctcctacaaagttcagtctctcatgggtaatggcagagtggctctcttggtcccagagcaagctagactgcttgggtcaacacatatcacagtccttgatggcatattatagaagggacatttgcaccaaggctctccccttgaggagtgtgtataacagtgtcccaaagagaaaacagcagacccactattgtggcttcaatctgatttcaaggttctggtcaactcatgaatcccattgtgagggggcccctgttatgacccttgggtagatacatcggtaagaactccataaggtcaaaaccactgggttctatcaatctgtctggcctaaaagggctggtcacttttggcatcgagaatatgcatgtctcagggtgaaaagtaccaccttggcttggagttaagtgtaagcaaagggagcagccacctgtgtgttgggatttaaaactttttttaattcatgtggctgtgtgagtatatgccatgtgtgtgcagtgtccacataggtcaaatgagggcactggatacctggagctggactgacaggaggttgtaagccacctgatatggatagtggaaactgaactctggtcctttggaagagcagcaagcaggcattgttataactgctgagctatctctccagctcttggtgggattttggaagaccttgctacagagctccaaagggaccccattcttagtcccttccattggcatacgcaatggcgtgtttagacacataggtaattttggagtcttttgttcagcaaacatgcattgataaccggagatactgtaggctctctatctgccctggaaatacaaacccatttgagatggataggactccagtaggcagcctgtgtgccctgatctgccagatgtgttggttttttgctgattatcctgtatatcatctgttcatgggatcctagatttatcacttaaaaataaaataaataccagcctgtgatgtcggtggaccttctggccctctgtccttggcttggcagacacaagtgagaggtatgaggtatacaagtcacactttacagtattagtcctgttaaactaagagatgtcttctgaagaatgtctttctaacccatacactcacacaattcataactgtgctgagccttaggtctaacagggaaatatgagttttagttgtgaaagtccattcaattccatcagaatgcaaccgaatggcaaaatgtctatgaggaagcctggttggatcttaatgtccccatttcatcaagggagcacacagttctttctttgtttcttgtcattggttggatttgaaaaatatttgagattttaaagaataaaatggaataacataaaaatgctgttagctttaatgtcaacaaaacaaagcagtcttcatggctcaatctgagtgttaaagttttggaaacaagtcatctaaattagaattgaattttgtccagacttaattgtaatctgcaatcaagcatccagtaattgaaagaggaaaaccctgggctttgaggctggttgtgaattgcaattattaaaaacaaaacctgtaaacagaggatcctgggatatggaggacaagtgttcaagctacataaaatatgattaaaaatgagaaaatctgtagttattttttattttctggaaattgatgcataatttttttcttacatgaaaacacatcctattgaaacatattaaagattgtgggacacataaatacctgattgcttttagctaaattgtgatagtctgccaagacaaagggaagccgcagttatcaaagtacacagataattttatatgttatcacataaaatatctatattgtggttttaagacaacagttgaaaaaattcagtgttaggaaaatgccactgccacaggatttgtattagttacctttcagtgactttaacaaaagtactgtaatcctctgaaacagtagaaaggttcatttgcctcacagtttcagaggtttcagcccacagtccattcactttggcctctgtgtgctaagatcaaatattgtggaagcagtgtgtggatgagcaaggctggtcacctcttgggtaccaggaagcaagagatagtgacaggagacagagtcccaaaaccctcttcatgggcatttccccaatgacctaacttcttcccataagaaccaacctgggaaaggtcccactaccatttgcactgtggcctgggaccaagccttccacacatggatctttcggggacatgatcgatccaaagcactgcaaggcaggtcaaagtacataaagctatagctggaatgttctccgtgttttctttaacattcagagaagcaatcgagaagtttgagctgtttatctttgatgtgcagagagatttgttgttttttttttaagaatatttgagagtaaattttgcacttgatctgggccaacaggctgagaagcgatgagagtaagttctgagagggtggactgtttcaatggctcacctgttttcccagactcagaatagagagaatgcgtaaggcacaaagaaaaagaacaatatgctggttgggtacctagagagagctttccaggcacaatcacacaatgtggatagctgtcaaaatcactgcaaaagagcaaggcaacctcagtcaaaggtgcaatcgtggtatcaagacttgggagaagtagagtagcaacactggctttcaccaggaagctgcttgctctcataggttttggtttttatgtggcctggtgtgggggtgaattggcatgtgaagcagaagacagagccccagaccctctgatatggacattttattaggaaattctccttcttcaacaaatgtccctctcacatattgaggtcatgattttcttgaaacaaaaaccaaccaaaaaacaaaagacccagcactaaacagtagaaagaattgccctaagaatttggaaccccagtctgaatcatacgccggccgatcatctggagtctcaggatctgggtggtccaaaatattccaagctgagaatacaatttacactatccttaactggcacctcgtagaagtagatacaaacactgtaaagtaaaccctccttatccaggtctcacgaataaaatgcccatgcaaaggaacagtccgcagacaaaaataaacacacaccaactggaggcaccacggaacagaaccgtcaggaaacacagatgacagctgagatgcacacttggatttcaagtaaacaacaagaaattgattaacatctttaaggaaattaagatgctcaaagaaataaacaacaacaaaatgaccaggaatgaccaatttctgctttggactgtgtttaaaaagcagaactgggtttagccttcaactttaaattactagacagccagacaaaatataacaaaaaaaggggggcgggtggtctggggattgagtaacaggtgatggaggcacaaaggaaaccagcctttgagaaaggtatcagagaccgagagtccacacagagaaatgagggacagaggtcagaatgtgggggtccaggacaattaaaacttttggaaaatagtggagagccatagctgctcaaaatatttcacactacatcgggcagtggcttttaggccttgagtgactccatttacaaaacagcgctttgcccccactttgagagggagctactgctgaggtagagtgactctgcatcttatttgggcaggaacagcatcaccctctgtcctgtacagaccaaaaaccagttctgcaaatcaggcaagtgacatgctaccacctctaaggcttatcaaattaaatcaggaaacatgtggacaaaggagtctatcaaagcctggaagcaaaacctggcctgtgaacttacagaacacaccagaacaagggatgggtgcaactctatcacctggatcatctgtgtgaatgaaagttctcagaaaagctgctccttcctataggatcctcctatagagctcactaatggattagatcttcagggactgttaagaggttggaatattgcaggtctggagcctcattataatttctctagggatatctctagtcccctaaagagccatcccttagccacttctgtgctgtacctaatatccggtggctaacagattaaaaatttgaaatgtactagcttaagaaaaacctatgactagatcaatcaagtagaccagtagtttaagtaaataaaaacaaacaaacaaacaaacaaaaggtcagtgtgagaatttactgtcacccactaggttctaaccacgtggaaagacacaagcatgtctatgcttctgagagtgtgcttgttgcacggcatggcactatccactgtccactatcctctatggagctgtttggttgagccctgatcttcacacgcaagaaaaagccatccaggcctcagaaagaaatacagtcaggcattcctaggggccaacagggtactgatacacatgcttcagcaaactgagtgggaagacctgctgatccacaggcatcaaacagacagagcttgacaggagtgcttagatcacagaggcaattttgtctggttgattctcacttgttactaaagacacagagtttacaataaagttgggtctgtccaaacgaatataaaccaatagggaatctgagggagaggctgtccttatcatgatgagttcataggctaggggactgagtaacgttaaacaagtaaaatgcagcatgagtgcctgtgaggtgccttctgagaagagatggctgtgacaaggtagacagaactgctatggagcaacctgttatgggacagtctctgagaaggcttcgtacagaagatggttttctaggtaggccaccggaaacatgaaggaacacacattaaaaaaaatcatgcaagccgggcgttggcgcacgcctttaatccctgcactcgggaggcagaggcaggcggatctctgtgagtttgaggccagcctggtctccagatcgagtgccaggataggctccaaagctacacagagaaaccctgcctcgaaaaaaaaaaatcatgcaagtgcatgcgtgtggagacggaagacaacctccactgtcattcctcaggagctgtcagcggtgtgtgtgtgtgtgtgtgtgtgtgtgtgtgtgtgtgtgtgtgtgtgtgtgtttgtgagagagagagagagagagagagacagagacagagacacagagagagagagagagagacagacagacagacagacagacagacagacagagagagagagagtgagtttctcaccagcctgaaactcaccaagtaggctgacatatcgagctctcagaaaggctggcatgtcagggcacaaaatgggaggatggatgcttagaagtgagaaatcacctcctgcaagtttttattcaccctacttgtatgtagcagtaagaaagaaaggagaaacaaaagcaaataacaaccacggtcatggctctaaaaggtctagtgaacatcatcaggtgtcttaaggtctactgctcctcaaagctgtgatgaatccattgggcccatctctgtcccgtgaggtctctattgtgacagaatgaaactcggcttcgctttggttaaagcaccatgagctacattagacaacttggtacaacttaactgttcccatgaataaatctatttgaaaattattcaattacacaacagaatgaattatcacctcatttgcatggaccccaaaaaatctattaatgctcaattgagcctgaaccagttgtgaaacaggtgagaatttatggttggatactctgattgaagctcaattaatgttcaagacagttttttaatgaattaagccctgattcatttgtatgctccatccctttcaatgcctaattgtgcctaaatcaggctatccttgagtaaccacagagccctctgggtacctaagggcattttgggctcctctgtgcactggcccagactaaccccaagccttcctccttcagctgtttgctttttgtaatgaacaggacttgtgatatgattattagttgccattaaggataacaataggctgtgggtctggagtctcgtttagctcagtagttaccacgatggctatcagccaagctctacaccagtacagcacatggcagagcagctgtggagggttcgggctctgcaggatggatggtggggagacaggaaagcgtggctaagcatcagtagtagcagtgggcagatgaggagagagacggagacggagccacatcaacggaggtagcaggttgtcatggctcctttctccctcctccaccccttcttccctttgggaaagcttgggtgtttcacgtctgccctccccacccctcactcctgaactatcacctgctgtattgttcccagggccccgcctgttactaagacctagtgggtccttttgaatggagaagtgatcgaaatgaataagtgggttaaaataaaatttgtgcttaggctccacatttctccagctatttcttgtatgtgtttggtagccttcctcaaatccccaggaaccagtccctagaactctggtttctttaggccagaatccttgtgctggttagaatagccctgacttccgcaaagagaagttatatactatgaaccaggcagggtctaaaattcgacatgaaatttctatcaagtgtggccatgtaaagctcttcagaagaaagcccctctctaagtccacacagacggttttcctcaacctctgtaacgtgttacacaccggctctgcctcggagcctttcctagtgtggctgacgtcattggtattctgcgaaggatatgtctgtataaaatgaatgccctggttgataggattaactgggggttctgcagcagctactcctaagtgtcccctcaacctcagtgagtcccacgctaccttagtctcatttcattcttgtacagagtttaggattaagctctcttagatctgtgtcagccaggtgttccgtgtgccaggctggtgggctgagggctccaatgtaatgaaaagaacttataatctattggctaaaagaaatgcctgctttacatgctagagtggataaattgctatgatggtaccagtagagcccagattacaaaacttttaaaatatgctcacacagtggcgtttcacctttgaaatgtatgttctcagagggtctcctagacattgtgttctggaagcagaggacaagaatgaaatcccaatttcaaggtggaaaatgaggactgaaacggttcctaagtgccagcagggtgctggcatctgtgttccctggcctcacctgagtgtggctctgccagcccaggtggcattatctctttgggaaaccacagctgtccctctccaccacatttctctgggagcttagatgaagaaagttgacaaattccagttgtgagagtaattgtctgatctggcacccggggaagttcccaatgcttcttctactctcaggcagatgctagaggaagctcattacccaggcactgtgaaccctggcattgctcgcacctcctgcttctccctttattacctagctggtatgcagccaaacttcaggtcccagaggatgagaacctccccccgtgacaggggcctaggaacctgttctctcaggagtccctcagacactgccatcccagggaaggaaacccacaatcatggtcccatctatcaactgtgggcagcacccagctctccagtttgggaaaccaacccacttttcttgctgaagcccccaggcaaagtaggagggctgtgtgggtgggggtaccattcagctttattactgatgggggtgtggcatggcttagactggctaagtcttccatggctaatgctaagtggggcactcagtccactgggctccactgcaggctttcagagacatgttgccctgcacacaagctctaggtcaagggcatcttactgaacatgttgtgagtgtgtgtgtgtgtgtgtgtgtgtgtgtgtgtgtgtgtgtgtgtgtggtgtgtgtgtgtgttgtcatcttcaggaggggctgaatttggcctgctcatgctaatcaaatactctaccactgagccactaaacaatattactcaatattactaccaccactaccaccaccactgttttttgctttttattttgagacaacatctcatactaagctgcccaggctggccttgaacttgcaatccccctgcctctacctctagaaaagctgggattacaggcctgcattactaggctcagctcttaacattgccatatgacatttgatggatccttggcttgggtgtggaatgaggtactttccctttttcttcctgatttcatgtccacctcaccacaggctcctagccacagtcgtggccatagagaaacaagtgaggtcaaggaagccacactgaactctcccacccctccccagtctatatttcacttacaagcctctaaactctggctgtgtggataacatgggatccatggacatttcacatctgttgacaaaggctcaccagacatcagcatccttccagccaccatattaggcagcagtgacatacagggaggcagtgatatagctgtattacctaacagctgtgtgaacccgaactaggaactcaacctctttgtgcctcagtttcccagttttggctgtaagattggtggttgagtcacagtcataatcagacacccataaggcatttacaatagcctcagtggcatagtaagaggtattatcactgtgttctcatttagaaacatggggagcaatttatacgccgtgctaactgcctgccatgtagctgaaaagccagaaaataagtgttggaaacaattttctccttcttcctctgatccggcagttcataaattagcttctattgcctttgaaaggttgaggggggaaatcctactcttgtttctgcctctttgttcatgggagtgagagagcctgactactgggatggtaaatgtgaactcaggaaatgagctgtttagctccgacctcttccctagactccaccctgccttccttcctggagtaccatggttgtctggggaagggaccagtgatgctgacctgagtttgagtgctggggcctctgtgggaggagcagggagagcccctctgctctgctgggattgacaggatatggggtttcagttcctagtccactcttgaatctattgccagctgactcagaatctagaaggaagagactttccactggtaactccagaagttaagctaagagaagataaagttggagcccaagaggaaatgaagaagtctcctggctctcacccaggcctcaggccattatgcttcattatctaggagcagctagtggcagtgggcagagaaaaagctcacccacgatggcgttgctgcccagaggtcctggccacatgggggggggggcgtccaacactctgctgctagttcaagagagtaggttttcagaacagaaaggatggaccaaacttgggacatagcaactgctgacagagcccaggctgcagcctgataggcacacaccgcatcatttctcccctaatgacttgcacatttcaagtgggggtgttaatcaacagacaattgctgcctggactgttaagaaaataataacagtctctgtaaattctgtaatgaactaggaaaacaccaccgtccggggaggaggcaaggagggaggaataaaagagagtggcatgctgaagaatctcataaaaaaaaaaccaaaaaacttctttctgtgtcccagagatgctctgagctcactctccttgcttcctaacagtcattaaaatgtataaaaatgaatgtttttaaagcagcaataccaagaattatcactgctgcagttgcctggcaacctgagactttggttattttatttctaaacagggaatgctataaactggtatccggagtttgtgcaaatagttctaaattgatgttctccccgtaaatcaggagaagataatccagcattaatgtgcatttagaggaggttaaatatgtacgtgtgtgcttctctcatacacaaagacccttgcacggagcttctccccaatttcatgctaccttgagtcaatcttccagctgatattctttcgcatttttttccctggcaaatatctccttaattttatggtacctgtaagtaatctacattcaaatccataggaacaggactgcgtgacaccgggtaggccacttcctccagtctcccacacctcttccaatttcccaagcctctcagagtaagtttccagttctgagaaagcagagaaaccccaaagctacccagacactaagaggaggagcgatgagatttttcaggccaggtgggagaatgcctgtgcacagcagttgcggcccgtatggcccaaacgcagacccgctgctgcacctgttgtcggcaggcgtctgcaccccaccgcctttcaaatgaggagaggtattaacattttaggagaagccttctcccccacccctccgagtcactgacttgaatttgtttctagtgctgcctgctgggatgagtgcatagctgtgctcaggtgcgctgttgtccttagaaaaatgttggttccttactccgccgctggagcctgaggaggcaagccaagtgttcccactacagggcatgcaagggggttctggcacatccgtgagacagaggcttccacaagtagatgcttcctgagggtgcttgcttatgcttggaggtttgactaaagagactgttcgcaatgcatttcaagcttggtggagccattcaatcataaagaaggaagaggagtgagcatagctgtctgtgcccagagcttactgtgactatcctgaataaatggagatctcgggcccacagcagcttaagcagggcttatatcacaggtggccgtgtggcaccattctccaagttgccggagaagagaagcagaaataaacacagcctgagagtgtcacagcatgattgcccatgaccttattaaacaggagtccagacattagcaaataaacacccatggcttagagaccaggtacaaacacactgctggcaaatgggcatatagatgtgaggttttatgcctaaattccttaaatgccaaagggattaagagggctttcatgaaaagcctccagaactcactccaggacagtttggaagcagcttttcaagaactgacctgtgcaaaagcagccaatggccctactgtgtcacaagcccccaaatcccgcacaaggacggtaactctcccagaacagagaagaccagtgaagggccacaatgacccgctaggcaagtggttctcaatctgtgggttgtgacccctttagggttgaatgacccttttacagagtcacccaagaccatcagacaacatagataacttccttacgattcctaatagtagcaaaattagttatgaaatagcaacaaaataattttatagttgggggtcaccacaacatgaggaactgtatgaaagggttacagcatcgggagtgttgagaaccactgctctgggcacacacaggagctctcgccaactctccacccccttctcatcatccagccaacaagcactgttgactggatatcctgtcctctttcacttcacaaacattcccaacccatgaaggaattgtgcttaaacacaaattccagcagggcagtggcagcacacacctttaatcccagcactggggaggcagaggcagttcgagaccagcctggtttacaaagctacacagagaaaccctatctcccccccccccaaaaaaatcccttgtctctttaatggtcatttcttaatgaaaaaagcttcatcattttgcaaaggcccaagtgtgctggtttggcttctgtggagtctgtaacaagcccttggtcatatcagtttgtgtggcttattaaagtgatggtttctctaaaggcagtgccagctataaacggagtccacaggcttcagagtgtgggggaccactgtaggaaggatgtgcttccttggggcttgtacccatcccaagacagcacctaaaagggaccaagctctcttgtagggaactggcttgtggttagaaattctgaaaccctagaaactttgtgatcttcagaaaagctgggacctcagagcactatagctgaagccaacttcaccctgacagatccttgcagtgacccctcagggacggactctcaaggtggacacaaagaacactggtttactgcatgagagttcatgccaatacctctgctcaccctgcctccctccatcagttgtggggattcctagcaccccactgagcaggaagtggtgaggaatagcaagtgactgtagcaaatgcccctgaaaggagatttgcaaatgtgctgtcagaaacctcaggacaaggacagatttccctgggtgtgagactccctgaagttagaggagggcaatttgtgcttcctgactagtgggctggggccctcgctgttctccttgcctcccccacatactttcctgaatggtgtcaccatttaggattgataaatgaatggcactgggattggccaggcagcctgaacggctgaggtggggcagcactcactcagtgtctgtacctgtcatctgcagaggtaatatcatctgcagaaacagaaccattcaggacacatctagggtacctgtgggagcacccaggattggtaatgaatcccagctcgctttccagcttgctcgcatgacaaatagtccagtacaatgatgaagagaaatggagacaggctataaccctctgtgcacattgcagttcacttcccagaagcaagcacaagtaaagctacttctgaggagacttgtctagggtgacagatgaagagcagtggggttttgtgttttggagagatgggggagggcaaaaaatatggtttgatttttctgggatttcttttccccctgaaagtaaacagaacactaggaaaccatgcaaccaagaaagatccctttgcctgggaagctaacgcaaagataaggcttgatgcccagaagggttagtctctaacataatgaggcaaagcatgactttggagggctatggtctgatggagggaatgtggaccatcctgctgggccgaacagcccgctgtgcagaggcagcctatagatagtgaagggaccagcttcccttttggcagccataacggccgaacacgtgcttctatggccttgacctagtcactagagaaagtcagatgcctgccttgtgacaagaaaccaatcagaagttagctggtggcgctatgctttacgaccctgggtgtgctttatggacaagtgcacagcaatgatgttgagcatagcaaccaccctgggagggcctatgggccataacaaccagttgaccaatcaacacagggcaagccctccaagcctggaagcacaccaatcgtgagcctgtgtgtaccccgagacactccccttacgctgccctataaagatctgtgcgcagcagcttcaaactgtcttttctagccatccaccatggcgggtgggtgaaagacccgagctaacatgttaaattacaataaagcctcgtgcagtttgcagcaagctctcgaatccgcctggtgattggggtgaccgagaacgtggcctgggaccccggatacttgagttttcgggggtctaacaatagcagggggagcttgctgagaataggcattggccagccatgtagcctcaactgccaaggtctcccaaactaggaaaagtcattcgatttgatcttgtcaccaattgcctgacagatttgagtaaatcttcgtcttaccttcctctgttctgaaacagaatagtttctagttgattaatcgatcagtttgcaaatgagattcacagacaccaaatactaaacctaggctgtggctaagaatcccagaaaatgtcagagcaaaagtcttgcaaagcttattcacagtgacagtcattatggaccaaaggatgacaggacaaatggcctggtcattggatgtcttgccaggccaccatgcttcctgacactgagcactgggctgtccagcaagctcttggtgatttgttaggcaggatcagggtagcttgtgtctacatctaatggctattagggccagggaacaactccatgacatggtattatgcagacacaacatttatgttaagtctgtttacatacaatataaaaacatttttgctcatcacctgtgtggccaaaatgtgaggaagggactcctggaatcaatcagaaagctgtctggaggggttggtcacattctattacagtctgtcagtcttccaagagggcaggtggttggccattaggaccaactgatgttaaagatatgtttaatctaacaagagaccttgagctagtaataaaaacaactcatagtggttccctagttgtttacagtggaaccaaactgaagccagaaagaagctactttacctaatcaaaaaatttcatatgcttacatttaaccagccctcccactatcaactcaacaatttgaacgaacaaatatttattaaaatcataaaggtgttccattctgtaggactaaaacagagtgatctactacccagccagtgaccttacaaacaaggtggcgttttgaattgtatctgtgatgatgacccaggaaattatcagattcaaagacatgattctcattcagcggaagccaaccaggtctcgtagctctttttgaccttggatgaccttcagcctcaacagttttaccccacaatgacctctttctttgccaagcccccagtcttctgggctacttcacagcagaaatcacagaaaatgaaatttgataaactgtcaccttgacatttgttctctcacaggaaatggtcctcacaagggtgaggacagccacgttggggcttatctgtctgggatatcaaatctcaaggaagggcacaaccaggattataactaccaggtaagccagaatgttcctcctggtggggaatggtatcagaccagaggagaggggaaagcctctcctgttccccccccacacacacagcagtaattttcatttaaagaatttttatgggttaaagtaaaatatcctctacatattcactcacggcaatatgagacaaatgctgtctccacttaaatctgataaaatggagttgaaccagatcattggctgatcgccattggtcatcagtgacagccttcttgattccacaaaaagattttgcaatctgttcttcaccttatttccttgtgaagcatataaaacagagacagaacctccattttaagatgagtgcaagttcatatagtcagtaacacacagctgagctgggcagtggtggcggggggtaagttaggctgggtcactcatgagcactggtgacctggcacgcttagggtttcgccaaaaatgggagaagctctgactttatcttcccagagcagtaatggtgaaaaggaaaggattgagtatatggagtaaacatgacacaggatggaacatggtaacaccccccagtattttaaagctttcttacgtagggatgtcaagtgacatacaggatgctcgtggtatccatgcaataataaatggggtcatacttgaactaaaaattgctgtttacctgaaattcatatctaacgagtaagctgtctcttgtgtgtggctttaacccggctgccccattcctctttggttgctgcttgcaataccatggaacagacacactgatgtaaagctgccagaaatccagcaagggtaactatgactggaagcctccatagacgtggctttatatgactgtgctgaagttaagcatctgcaacacttcccaatttaaaggatgttgcatcatactaaactcataagcctgtccagactgacctttagctgcccctctcccagggcagccctcctggacagagagccactctgctcacactatcttgctgttcagtaggagagccacttacttgtatgggatgtgtttgctgccattgacaagagccaggatgacgttgcccagagcagacagcgagaggcacagccccgagcctccttctcgatttttgctgagtgctttcacacagctgcccagatcaatgagatgtagacgactgcgacctccagacactggcacaggggagaaggcaagagggaaaaagagagtgggtaagttctggccagcacattgtctcttcttcatgtagctctttgggaatcttggggaaagcaaaagattaacatttggtgacacaaacaattcaagttggggtttcaaataggatcggtgttcttaaattccttcctccacattccttgccccttaaacttactgccactcattttgcaaatagaggaacaactcctgtagatcagatggttggttgaaggagggtaagggcttaacgactgtgttctggatgatggagttctgaaacttaccaggttaaaacctgagcagctcaggagtgattatctactccagtttgtcattgtcaggcagccaacctaaagctcagccaggagtcaggttggtaaccccaggagaaatttggaagatgtaagctccaggtgcaaaggcaggaaagacccaactatttgctgagtgcctgccaattgccaggtgcacagacatccatctcattcaattcccacacaaaagcatccacacactatcaagctcttcttacagatgagaaaatgaaagcccagaaaagttaagaatttcacccatgaattctggctgcaatgaaataacagggaccaggataagtcttgtatccaaaacaaccaaaaataaacagaatgtataaaatagctgtttttaagacactagacattagttggggaagagcgactcttgagacacatgaaacaaacaaggcaaacactcctggtctcagctaactctgctaagagagtttccaggctcaggaacaaagagcccaggtagaagaacctggtgaacccattgagctcaagagagataaaagccagcgtctagggaaaccaaggcaccagacagtctctggaagacccaattgaatggccatcagcagatgcaagtgagagaaactgctgctgaaagggcagaggcgcctgttcccgatagtcagactagaaaacccaaaagttcgtgtgaaaagacaaataggcatgacaaaagcagtagaccatcatccccataggaggaagtatttgagataaacccacaaacgcatagctattagattccacagagaaggccatgaaaaccagttaatgccattcggtgtcaatgttcaatgcttaaatacagacatggccaccctgggctgtataacaaggtctatctcaattaaaataaaagtgtagataataacctctaagagattattaaaacagagatgggattgtgtctgacagtttatggcaggttccaggtcaacaaaaggaaagattaatatatttataatatatcaataaaaatcttcaaaatgaaatagagaaaaaaatataaaagcatacaataaaattaaaaataagtacagagaaagagagagagaccaatgggtaggaaattaaaagggctacagaacaacctcagatgtctaaaacacacatggttggaatttcagagtgtagcacagatgcaacgtttgaaaaaataatggtccaaactttccccaaatgatgaaaatgactaactcacaaatccacaaagctcagtcagccctgggaacaagaaaaatgaacaaacccaatgaagccaatgataatcacaccactcagaacagaaggaggagagaaaaacagcccagggagcaaaagtatattccatacatggaacaaaggtaagcacgatggccaatttctctttggagataagtaagatagcacagtgacatttttgaaagcctaaaaattgccaaatgggcagtcaacatctggaataagtatcattccaaaacaaaggggaaagaaatacattttttttcttaatgtggagctgggaaggtggcccattgggtatgaacacttggcatgaaacacgaggacctgaacttgagtagtcggcagtcacataaggaaccaggcaccgctacaaaaccctggaaacccagcactacaagcgggggatggaggcagagacaggtaaaacccaaaaaccctctgatcatccggcaaaccgaaacagtgagcatcagcttcactgagagaaaccctgtctcaagggagcaaggcagagagcaacagaggaggacgagacatacatacttaaacatatacatatcatatacatatacatatcatatacatatgcatatcatatacacatatacatatacatacactctccacacccaccccaacatgttggcttcatgtaagggatgttcaggtggtacctgggtatacacatctgggtacctcaacacctgtaggaagaactcagccaccactcatgagggcaaggtacgggtttgttgttgggtaagaacttgagggaatcatcttggcgctttcaattcccatgcccgctgctgctggtgaatattccaggaagggcagcattgcctcccaacccttcagtttccccagctcgggtcccacattttagacaagaatgaagttcattttgtttatttccaactgtccctggggcaatcccttaaagggtggccatattacttctcctctatcctatttcagatcgtgcaagattagctcatgccaacgatgtgctagggaaaccgttatttttaaacaaaataccatctgttttgcagcccaattatatagacaggagaggtttaggtattcctcacgcatctctgatgaaagggcaaagacagagaccaatttggactttcagacttaatagtccatttgatgtaatggaacaaaatgtataatgtacacacagtaaaacagaacacagagaacaaaaggtggcttgctctgtgctggagagcgtcttcctaaaatacctgtaattaccgtcatgactcagagtgagaggtagtctcatacaatggaaaaagctgttctctgccctgtacccactggcattcgggtggtcagagaatctgactttcacaaatggagcttaatcaagactggggagaagtcagtgggcacgggctgctcgatagcgttaagagtcaacatccctgcaagtggctagggagaaagtgcttcggcaaggactgagcaaaaaaaaaaaaaaaaaaactgtgatggttaatccatccaggtaagactcaggcttcttatcatcttctcagatttctgagatcaaggacaaaatagttaaaggaatacacttgaatctgtcttgagccactacattttttttttttttttttgagagagtgtcttcgaatatcccatatcccaggctggcttgttatttttctgagaataatactgaactttagatgcctctgtctttgcctcctgcgtgctgggacaacaggcatatgtcaccacacccagtttacctgctgctggggtcaaacttggtgcatgaggcaagcacgcctccaactccgctctatgctcagctccaaattctttatgttttaaatctacagttggaccaaaccaagttacacacatgccttattttccccacagggagtaattctcctaatatcacttaatgcctacattgtgcataaattggactgaaattatagatgagatccacatatgctgataaaaaaaatcatcccatgatttcattgaaaattaatgctgagttagacagaaacccacagtgaactctagaacatgcaagaccttttactcatcttggatcaacgtggcttccaatttggcaacactctggaatcacctgggaccggccaaaagctaccactgctgcctgctcctagactggagtgcagcatggaccctgggattcacttaaaagttctccagacaactgccatgtgctgcaatgtctagggaccactgtctccccacatggctgggttgttagtcacactccccatcgcccagtaaaacactgaatgacaaccacggcacgccaaatgcctgtggatgctttattttagcacttttgttccatatctgccagaagattgaatacttatgacacttgtgtttattataactaaaatataaataacacagaaaccattaatatagtattttgtaaggtgtttgaacatttatatgtaaattaaatgtaatgtttggggaaggtattttaaagacgagattcaagttaaattagctgtacatgagaaattatagaaaagaagccagagaaaggttggattcagttggcagcaaatgggtcctttcaagtttttgaatctctttgaagaaattaaaattaaaaaaatgattaaaattagtatggttcatgaaagttagaactttaagttaaaaactcatctctaagggaagtccacactgcatgcccctaaggtccatgaacaagtacacatgttatgtgaatgtgtctttcataatgattcccctttttatcagactttctctgtgaaccgaccaacttctggtagtgtagctcataacatcacctggcttgagggtgttttgcaagctgttctagatatttaaaacaagtgatcaaaaggtagacaaatgcatttgggctcagtttcatacgtgtcagtccatggtcacatggcctcaacgtgaagcaagaatgaacatcatggtggtgaagatgtgtgggggaggggactgctcgtctcattgcagccaggaagcataagcaaacagaaagatagatctagccttgcaaactagtgacctgcttcttctagtgaggccccactttgatttctaacatctcttaattggctattcggattctgaatcaatcaagtcattaaaccattcattaggccagagccctcaggacctgtctccggagtagcccttacatgcacactcagaggtatgctttatcccccaataattcaaaacccaaacaagttgctcttgctctctgaagccagctgtactagatggtagaggaagtcagggttaatatggcacacattccattgcatataatatacaggtactgagcactgacaagcaggcacaggaccagcaccatggagacccaagatgactatcagagtcttctgttctcagcaagtacatagcctggtggagcccaacgagcatgagtgataaaaacataaggcaggatgggacaaaagctgctctggggctctaaggggaaaagcattgtgtctggagagccgtgaggaggaggctcttatggaggaaggaggcttgagaactctgctgttactgtttctgtcccttccctccatcctgaagtgaggtagctctgacattgatggtgggagagatgaaagatagtactgtcacttcataatccactctggttagggagctgggagtcctgtagtatgcagccatcttcctgttcagggctttgctgctggggacagtagtgggggctatgatggtttgaaagaaaatgccccccatgctccctgccgtgatgataatggattaaacctctgaaactgtaaatgagccaccttaattaatgttttccttagacctaggaaatctatggggccttttgtagtagatcagtacttatccctagcgtaggaatagactttgggagcccatttcacatagagggatactccctgagcctagacataagggggttggcctaggccctgtcccaaaggatacgatagactctgaagacccccccctcatggaaggcctcaccctccctggggagcagaaagggtatgggataggtagggtgttagttggggggggcagaggaggaggggagggagagggaactaggattgtcatgtaaaataatattgtttagaatttaaataaaaaatggagaggaaaaaacttattttgtaaatgttttccttgtaagagttgctttggtcatggtgtctcttcacagcaatagaaccctgactacgacaggggcttaacccccaccgccttatcacatctactaaccagatgatgggtccttagagccctgtaactacacagccccgggtaggacatggctgacttaggacattccttcgtaaagaatgtgtttgactgccatcagaaagacaagatgaaggaaactgcctattattcttgtaccaggggagtgtatgcacagatgctggtccatgtatattcattcatgtatatgtggacagcctagtccaatttcccaggaggaagcaaggtgaatgtgaaaggttcaggcctgcctctgttacctgatggaatccactcaggcagaaccctggtcagcccagggttccatgggaactaagtcttcatgcaggtgcaaaggacccctttaaaagacagacccctgcctacttacgctccccctactcttgtcttctcttctcttctcttctcttctcttctcttctcttctcttctctcctctcctctcctctcctctcctctcctctcctctcctctcctctcctctcctctcctcttttttcttcttgaagggaccagctccccatttcggcagccattacagctgaacacgtgcttgtctgaccttgtcttagtcactagaagtcagatgcctgcctcgtggcaaggaaccaatcagaagttagctggtggtgctatgctttatggctctgggtgtgctttaaggacaagtgcacagcaatgatgtacagagcatagcaaccaccctgggagggcctatgggccataacaaccagttggccgatcaacacagggcaaaccctccaagcctggaggcacaccaatcctgagcttgtgagtacccctaaacactccccttatgctgccctacaagatctctctgcagccccttcaagctgtctttgctagccatccgccatggcaggtgggtgaaagacccgagctaacatggggttagctcgttaaacaacaataaagcctcatgcagtttgcagcaagttttcgaatccgcctggtgattggagtgacctcggtactgggctgggaccccggaggcctgagttttccgggggtctaacattctcttctcttctcccacctacgctctctgtctgcctctctatggcagctggccatggcggtcagccattaactctgttcctcttctctcttagtctccctactctgctgggcctagaataaactggttaatatgtctaatatgtctcatcttgagcctcttcttttatttctaatttaagtaaaagaataacatttggcgcccaactcagtttaggctctccctgaaacctctccggccaggggtgcaaaaaattttggggatcctagaatccgaactcataacccactttccatcttggtttttcctgccacttcctcctgcctgcagcagcctgagatgccagaaccctgtacacttcaaccagttcgattttccaactaaccatctttggaatccactcatctgcctgttcgctacaatccggtaagaaatcccttgaatttcctgagggtcaggttaggaatcccactccaggagcggtgctttttggctttttcagttcagatccctgggtcctttttttggtatcagggctgctgagcccccatcagactcctgtgtctctcaggcatggccctggcaactcccacaggctgacgggcatccagagaggagcttttgcccatttttccacttgcctcacccatgggaaatgcataaggaacctttcggttgcagccaacaggcaggtaaacagacaaaaaagcagcttatggtcgctgccattttggccacgtgatctgacctggggaccactatcttggccatatgggctaacctgggggccgccatattggccatgtgacctgcctgtaggcacgcccactccagcagccgtgccagcaaacctggctgccggactttttgctttctgccagatcttttgctttttatttatttatttttttgtctgtgatttcttctttcactggccctgttgctcatggcttgtttacagaatactgtgtctttccagggcactctgtttaagttgactctgtccctttaaatctcctgtctgtttgctacaatgtacggatcagagatttcattctggttcctccttttactgttatcaagtcctgcttgtctctgtaatttaactttatacctatgtaactatatacaacttaaattaaactatgctaagtctcatatttctaaattgctacgtatctttaaatgatagcaaacatttaaagtcataaggtctaatttaactatacttaaaatataagctaactctatacaacttaaatttaactcatgtatctttaaatgacgatgaaaatttaaaatcataaaggtctaattcaaattaagaaaatatttaatcactcagtctatcctgtaagccgtttacaaaggtacacctttttattataaaaaggaatttttttctctaactaaaggcaaacttttgactgctgagacattaagccctcaaatgttcagagatctagagaacatggcatttaaatgttttgttaaaaagctttctataacagagctagccagctctggccccaccccatttcccccaagaagactgatgggcactaaagaaacttcacctcaagtcagtgacagtgctagtcactgcccttcacctcaactgctacaaagtactccagactgtggacaagaggacagtggaatcgactttccctgcgttgcttgggtcaactgtaggttagccttcctgtagtccctaatccaaaggtgacatgctatcagcaagaaggcaggtgtcctacagcccactactatgaatggaggaccttggtgctggctgtccatgcagcctgctggcaagtctctgttattctttaatcattgattcaggtaaaatcttatccttctcaagaactctgatgcttttgacaactggtagtcttgccagcttaaagcaaaaacagatttcaggaacaggaattttaggttttatctacgtgaagatagaaaagtgtaaggcatatgaaggtctgggaatgtagttacaaaggtctgaggatggaaaggtctaacacggtggataaatgcaagttatgaaggtctgagaatataaggtataaaggtctgagaatggaagatctaagatggtaatgtaaggtgaatgaattaaagttatgaaggtctgaggatataaaggcttaagtgatgataaagtgaattgagacattaaaaagaatgaaatatgttccagatttctctctttctcatgctactgttcatagcaaagttctacaataccactatatgaccataactacaaggtcaagattaagatgcttttcattgtcctcaaaaatgtctgtcaattaccaagttgcttctaacatgaatatgctgctaatgtgtctaatacttatgtttccacaaactctaaggattcttgtaagttccagggagctgaattggatccaaacaaacaggtcagattcactccaaataaatattattcaatctgtccctggtcccaggactcccttccctcatgttgggactcctcgggaaaccctccctcaccttacaatcttcccctcaagtgccaggacctaagaaaaaaattttttttctaaacttaaccttgtcctctgctgccaacatcttgccaggtctaagaggcgcccaaggagttccatacagcctggactgtgatgaaacaaccagctaccccaggacgtggcagcaccccaaccttctcaggtcccccaaagatggtcaatgccccccacatcagcaggaagcagtcttgagaattcgacacccttattccttaatttgccatgtctaacaccccatctttttttaaaaaaaaaaaaatagtaagtaaaggtgggattgagccgggtgttggcggcgcatgcctttaatcccagcacttgggaggcagaggtaggtggatctctgtgagttcgagaccagcctggtctacaagagctagttccaggacagcctctaaagccacagagaaaccctgtctcgaaaaaccaaaaaaaaaaaaaaaaaaaaaaaaaaaaaaaaaaaaaaaaaaaaagcgggattgaaaggttcaggcattatactggcctgcccctgtcacctggcagaatccactcaggcagtactctggtcagcccagggttccatgggaactaagtctgcatgcagttgcaaaggagccctttaaaagacagatgcctgcccacttatgccctctgtactcttctcctctcctctcctctcctttcctctcctctcctctcctctcctctcctctcctcctcccctcccctcccctcccctcccctcccctctcctctcctctcctgtcttctcttctcttccacctacgctgtctctgcctctccatggcgaccggtggtcagccattaaccctgttcctcctctctcttagtctccctactctgccgggcctataataaactggttaatatgcctcttaatatgtctcatcttgtgcccctcttctttcgtttctaatttaagcaaaagaataacagaatgaatgtatcagaggcccagtgttagctgtccacagacactggatatttgcaagcttgctcatcaaagagatgccttgatatcatctatttttattatgtatatgtatgatgtgtgttatgagtacaggcatgtgcaagctatggcatgtgtggaatcgtttctcccttccgccatgatttctgggaagggaattcaggtcatcatgtttatgtggttagcacttttacctgctgcgccatctcaccagcccataaaagaatgcttttaaagaccatgcgtgtgaagaggacaaaggaaaacaggcttcactggctcactgttgtggaagatttaactgtgtaaaggtgtgtcacatttgtttctgctgcatttgcttaattatgtaaagatgtgttgcatctgtttcaccttgtctgcctaagacacctgattggtctaataaaaagctgaacggccaatagctggatagaagagggataagcagggctggcaggcagagggagtggggaggagaaatctaggcagaagagagaatgaaggagaaaagatagggacatgcttagggccagaagccaggtagccaccagctggccagccatggagacagcaggaaagtaagatatgcagaaagagagagagagagagagggagagagagagagagagggggggggaaggaaggaaggaaggaaggaaggaaggaaggaaggagggaaaagaaaggtaaaaaaccctgaggcaaaaagtagataaagagaaacaggctaaaataagagcaaagataaggctgaacattcataactaataacaagtctctgtgttataatttgggagctggtcagtggcccaaaagaaagcctgttacagctcatcaccccagagtgacatggtatacattatgaggagtagcacttgctcattagggacctctccccaaagctgaatttgcagagagtctgcaagtcttcatagatttaacagtaaagacttatgaatggggaaaaccagttctgttaatattgcagaagtcttggcaactggagagctattttaagcccaataaccatttttttttctttttctatcttgaccagaaggtttaagtcatctaccagactctctctgtctctgtctctgtctctgtctctctctctttctctctctctctctgtgtgtgtgtgtgtgtgtgtgtgtgtgtgtgcatacaatgcatagatgggtctaagactctgagcaaattcacactatgtatttagttcctgcagcagagattgtccctgaatccatcatcaggctaaacctctcccagttggttaacagccctgcttcctgcttccctgcagggtgactaattaataaaccttcccttaattgagttctggctgccaagtccacagggattataacttatatataagtaaacaaaatttccattttaaacaacactccaaatcttctcattatggggttagccgcataaatccactgaaaatcctgctgggcctgaaggcagagtctgatcatttgcctttgagatgctggggccctggcaggcaggaggggcttgcccttcgccctttacacctggaccctccctttctctcatctacttcgctgcaacaccagccaagcacctgagaggtttggaaggtgttggtggcatctgccttttctcattgcctgaatttattatttaaaagcaattttcatgcacaacttaaaaataaagaagatgagctagatgttaaatatttaataagtgcttagaatttggtaagaccagtttgggagtaagtcttcagttttaggtaatgttcttctaaatagttgtagagtcagaaattcaaatttttacatttgaagtacttcaatgaaagctttctgtattcccattgtttgctactgcttccagattctaagttgcaaacaaaaccaagaaataaaaagtaaaagacaaaaagagagctgctggcttaatgtataacttagaagggtattgttccgccctctgggcctctctacttggtgcctttgggagcccttgtctcagaactcagagctgttgggagttccctttgctgaccatatgagagctcactgaaggctatgatgattattagtattgatagctgtttaaatgactaaaataaacagttttccaactctcacatcaactctgctaagacattacccagaacaagcagggagggcaggatatacagccagctcccaggactgctgggagaaacacagttcagccacagatttctgagcccaggatctcctactccacatcctaattcctgtttctggcctcaagaatgttacgctaaatggaagtgcttgacatggtgtgaactcctcttagagaattgatgtcatttaaaagattcccactcaacatgtcctgctgttctccagtcaaaccctcagaatcacaggctgtccaaaggagatctggtcttaggttaatggtacccttcccagggggcatccagaagtgataagttgacagccagggtctctagatcacaggggaattctccatctgcttccagatctacacaagtggccttggctagtggaaccccagtcccagatagggctattttcattcattccacatggaggggatgcaaggcatgtctccagggccagtcaaaacaaatgagcaaagaacaaggaagataagtgaacaagcaagagaagcaaatctcaagtgcattgtgctaaatgaaagactcctggtgcaaagggacccatttgggcctcagaattgattcacacactactctggataaaggtcaaatgcagacaaaaacagatcagtgcttgccagggactaaaggtggggggtaaggactgactataaagggcaaagagaactttccaggccactgatatcaccttggattctcctggttgcacaagctgtatggatttgccagaactcatttaaaaacacaagagacaaatcccactggatacaaattattactcaataaaccagaacctaagacatggtaactaagttaggtgttgtgggcacactgctgcaatcctggcactctggaggctgaggcaggaggattgtgagttcaaggatacctgggctaagtagtgagacattggccattggatcaagattcccatacagagacacccaggtaagtgttggtagccaactctggtgggcctggaatgtacaatgatgacagacaaagatggataattgcttcaggtccagtcctaaatatgacaaaagagccaggctgggactatgaaccacagaactggggagctggcattgtggctctctgacagagcaagtactgtgcctgcatttgtacaatgcatttttacacacaggcaacacagagggaagcagctctcacctggaagttctttcaaagtctaatctataaattattaaaaaacatggctattactccctagcctatagggtggactcaacataatgatggatcccatactgagaggtgctctagcagcttactgttgttttttgtggtatgatggctattctttgttgtcaacttgactacatctgaattagcccaaaagtagagggcacacctgtgagggattttaatttgaagtgggaaaatctatttctaatttggatctttgaggtaggaagacaacctttaatgcagaaatttaatccagatctaatctgagccacaccttctgctatgagcctagataaggacatggaagaaggattttttctctttgcctgcttgctctcaccttgctagcaagtccattccttcactggcattagagcctacttcttcaggattccagcattagaccagctgagacatctagcctcacggactgagcaactactggatttctccaccttcattcagaggcagccattgttggattagctggaccacagtctgtaagtcattctgttattctataagtcctctctctctatctctctctctctctctctctctctctatatatatatatatatatatatatgtatatatatatatatatattcattctataaattctgtcattctagagaaccctgattaatataggtgacccctatgagacatgtgagcagaaagattcaacagctgttcttcttttactttttaaattcattctttcatacatttaaggcaatgccatctgtaaattattattgccaaaactaaccattcgcctctgtacaattaaaaagtgaacttgagcctagaatctataattatcttgaattccagaccactgagctgcatgtgggtggcataccctctgctaaggaagggcgatgttgcctcagctgaggtgtcctggctggccagagctagtgatagagtcagctaagacggacttacttccacccttcccgctcttctccatccggtactggtagatgtgcagggtgaagagcatgtgggagtttcggtggtcatcctcatcacagtcctgttggttgcttcgtcttgaggcaatggcagcatccaggaagaaggcagctttctctgcagtgggggcccgcagctcactctggttctgcagctggaggacaaaaaacaagagctgagaccttcaggcttccctcctgcctggggggaaaggctagtccagtctgtaaggccagaagtccttctgaaaccaggtcctatacacatgggccattctcagcatagtcatctttttctctttctccattttcaggtatggtggtatgcatgtttgcatgtatgtgggcacacttgtgtgcacgtagaagcctgaggttggcactgggaattatccttgattgttcattgtggcagggcgtctcaattggtcccagaattctagctataatgagtctcatggccagcccgctccgtagattctggctctctttaaagcagtggctctcaacctgtgggtctcaaccccttagggccgaatgaccctttcaaaggggccctctaagaccatcagaaaacacaggtgtttacatcatgattcataagagtaggaaaactgtagttatgaagtagcagtgaagtaatgttacggttgggattcaccacacaggaggaactgtattagaagggggcagcaacaggaaggttgagaaccactttagaggctgagattacaggcaggctatcatacccacccagcctctacacgggttctagggatctgcacactaaccctcgtgcttttgtggttagcactttaacggcagagtcagccccgcttagctgattcccttctgaaaattaatattgagcgcatttattggatgtaatatgtttttagttattttacagctaacaagtggctgtatggggggttagtggtagcaaatccccatctctatgaacagacatccgaggtcattcctctgctaacatgagagacgtgactaggtgttgactatagagatcggagacaggtgctgtgaaatgtgattttacatctgacaaggaagagacttgcctaatggtccctgccgatgcatctctcagttatttaacaaaagctaacttgaggtcacattcactatggtagtcatgaacaagaaggacattatgatgattagtgataactgtcagtttgacagaatctagaatcactcgggagacgggcctctggggatgactgacagggttatcttaatgacatcattgagagtggcaccatcccctggctgggatcccaggctgcggaagtggaggaacagagctcaacagcggcacacatctactcgctcttgcttcctgattgtgaatgatgtgaccagctgcttcggctcctgctgccttggtggtggcctgtcccttcaactgggagtcataaaaaaggctttctctgtcaagttgcctttgtcagggtattttatcatagcaatagggcaatgtataaaaggcatgtagaaacacctaagcatttgaaggtctcatctgtatttaagagacacctggttttgttgtagttcctgaatttctatgttcaaggcaaactcatgagtgattagaaaacacgcagtgggcactgtgtctaaaccttgtgagaaccctgggtctgaatcccagaattcccttgtgtggtagaaaaggaaatctactttttggtttagttgagacgagttcttgctctccgtcaaaccccccatcttctccccatagctatccgaatgctggcatggcaggtgcatgcctgatttagctttgatttctcaaggaactgatttgcaacatgtctttgggttggtacaaattatgacaattttctactctgacttttaaccatacctataatttcaaactgtgagaagcagtatttggtgcaggcaggatttgcaagctaagaccatctttaaaatccttgaattttgaagggattttatccggatgcgtgcttttgaacttactatctgacttaaagtaaagaattacaaacattttaaaggagagtttcaagaggccattactttcttcatcttatttaccttctgttaaacagatctttacttaagactcacaaatgaatcttagttaacacacattagtagactaacaagtgaatctaagttaacacacgtttgagtgccgtcaagcttgcagaaggagcagtggccagggtgcttctgcttccatcagaggccatgcaacagcgtctgcacatatgttatgcttcagagcaacagttccctggatcagatgggatcttgttagaaatgtactttgaggggcgatgagctttaccccaaatgaaatcagacactcttgaggaggagctgccccgtgataagtttcaacaaggcacccaggcagctctggtgcacactccagagatttctaaatgatactagaaggttctgagtatccctagcagaggctgagtaagggccaggcttggagagatgggtgtaatactggttctggggcatcctcagatgcagaaatgagccagctggtaggaggtgggcacttatcaaagagacacctttctgaaataggaggcatttgggaagcctactgcaggagactggcagaattgactttctggatatgaaccaggggagccctcaagtcatctatgttacacagcaaaaggaagagacctcataacaggcccgacttcctgaaaatgcaaacaagagcttctcttggcttccatggttctagcaattatatcacggttctaattagaaatcggttattagttttcccacagcactgctaatctggctgtaaagctgtgccagaaacacagtttatagagccataaacagccccaggaatggtttcagctatttgtgcagagcagtaaatatttcagtttgttgttaaacaaaagaaagattgtacttttcccccctttcttgaaaggcgtcaagaaagtggattcaatttcccccaaatgctatgacaattgtagtccctgctcattgtcaattagattcaaggtacaaatatttaggttgggtgagcagatggccctacagctgcaggccataaagttccagtccactttaaagtaaacactcataagcctttcccagtttacatggtaagtgattccagagctgagatgccccatcctccaaaggagagatgaatcacccccacctcagccaagcttccaaagcagtcacctgtgtgccacagatggggtcctcacagaggtacactcctggggactgtccgtcctggaggctgcccgtggccacctcagacagcaggtctcgaaggttctcctctttcccccacacttcaacagctgagattcgaactgagaatcgggccccggtcttttctttacgctcattgataagcttgaacagccaagaaatagcacatggaatgatgcccaggttctgcatggagtcatcccttccaatcatggtgtaggatttccctgtgggagcacaggaagaaagaaacagttggagaggccagacaacactctttatagcttcaaaaaacaggtgcctgggacacagaatgtaaagaccagaaaatagcaaacatttccttgtagtggtggtgatgaaaacagctataagaaaatgtgagagcccaaacaaacagcaggatgaaatcacaaggtaccttgcggaggacctcagacatcacaggctatctgttttctgcattgttctacatgaagtaggaagctggggctttccatcaccgttacagtcctttttatagccaccccacagattaaatccacacacgcatgctttttatcctttctcaagttaaatgctgtgcatatttttatagcgtgagcaaattccattaaaatcaggacccctgctttgatctgtgatcaagaagtgaagaaaggcgtgggctataccaagccctctgatggaaggggaagggccgctgcgccctctgcgaggcctctgggatgaacccttctactgaggagcacttttttgagcttcccaaattgctaactcgttgtgcacatcagacaaggcctgggaggaacagatgaccgtaggttgggacagggaagagggcatagagagatttaagccaatcccatgcgtggctagctgggggctccttctccacatgctcagacagggagggctcctcagagagctggctgttggaggtaaggacagctttgcttggagattccattagctccacccacctaaatctgctccccagccatgccctattcctgctcatctcctgggactggctatgatctagaccaagtaggaccactttgctactccgatgcgccccctcttagacttgaagctgttctacacaaatgggtgtgcacttaggaccgatgcttctttcaaagtcaggcatgattattcattatcattcagcatggcaccaaacgggagcttagcccttcctttcatcgaggattctagcgtcactgctgaaacacagatgaggggacaggaaacgtaatgagcagcacaagaagtcaactgttcactcacccagcttggcatggccaaaacagaacacacagccatctgccccgttcaccacagactggattacctcggccaccgttccagcacacacttcagcctggaagacacaggaggagggacaggtggtgaaagtagcaccccgaggcacctggatgacacagaagtgagtctgccttcctggggctgtgcgtcctggtgtcacagcattcccagatggttcagcctctgccacagaattctgaggggactcgggaaccttagggaccttccactcttggctagcctgtgtgggaaacacgttggctctagaccttccttccactaactgatggcactctccagccttatacaggtaaagtgggtacaggctgcagagggagaaaaggacaggttctggaccctatacctgtctgtcacctattgtccctaattccaacctcctgggcaaggcactcagttctctatcagacctctgcatgcacgtgtgtttctgaaataagctagtcatactaaagtggaaaacatgattgctatttaaggacagaaaccccgaggaacatcttagtcctaacagaatggagagcttctagtccgctttctctccatcccttctttctttgctcaagtcccacttttgaaaaccccttttcctgtctgtacactcactgtaaacagcatcaacagccgcacactagtgtgtttgttatatgcagcattctttagctgagtgtgtcttgtcttcagtctgatcactacaatctacacagaaaccaggtttccatcccttctttgcctctctccattaacgctctatgacagtgtgtgccgcaaactaaaggtatacagtcacatttgtggaccacctcggagatccagaaaccccctagttagcatctgagactttcatagctgccggaggacagagttgttttccatgtctccttgccttgccatcacttctgtctcagggctgacatcagagctcacagaggccctgagagccctcacatgctggggctctgcagccatcagagcaatgtgcctcccagtgggaatctgaaaagcagcagcttgggccatgaatgtagttattcagctctgtggtgcagctgcgcaatgaatctaagtatctggaaatcaattttctctcccaaacagaaattgaaaaaccgcactcccaacaattgtcaactgttcaggggtggtcgcctcagcagctcttcagaggtctccctcagtcaaggggatacagggatgggctatatgaggaccatgagatcttatacaactcccaggactgaggcaataagagccaacactgcattaaagttgagactgaagcagtagttttctggaattagccagagttgtctctgcaagagcagggagaagctactgccctggcgcctgcctttgagtataaaaggaggtgggggttgggagactgccagccacctcaaccacatgtaatatgaaccatgagagccctaagtcagcagggagaatttgggttacgtgtggaacaaactgacattggggtcaccagtacagaggccaagggccattggagacacaggaatggcctcatcgggtgtaggatggtccacacactcccttgtagggctttcgcctaactgttcacagaggagagactgaggagagatttggctatgttggattgttaaggggtgccagtgacccacagaaacaccctgccatcctttcctgcaggcccagagaagcagaatgcctccctgagcacacagctatggcagagacagctctgctcaagactctgctcacccacaggctgagtcctccccactgacccctaagccagatccaatagaagtttgtaccaacagtgggtagtggtgctgccaaggctgcttgagggtatcaaggatggctcctaatgaaggaacaggaccagtcttgttgttactcagtgccaaggagatgacgttcttagaggaggaagaaagagttcctggatgcctggggtcaccacagtgacagctaccacacaggcagggacctgagagtggcccttgaatctgggccagtagaatacagtggaaatgacagtgcctcaactctaagccggcatttctaggccctgggcagtgccatgtccacaaacccaggcaagcctgccaaacagtgtgagacaacacagatgcaagatctggagacccagacaaagctactctgtgcacttagccatcttgcactttgaggcttaaggggtgctgagtctgtggggttgagctggctacagccagtggtgtcagattaacactcatggtgacataataataaagacagacaacgtctatcgagcacctgctgtcacaacagcctaattaggcatatatagaatataaggacactgagactcagagagcagagtaacttgcccactggcacactgctaggaaatagtgactaaaatgccgacaggtcggagactgctgtcctgcgcaggatgaataccgtgaatgggaggtggtgggatccagggaggatgtctgctaaggacaagaacgaagatgacaaggctaacttgtggagcctcggttcccttgtctgtagtgtgaacagaatgaaaaacgttcccttctacccaaaagaattcaagggagagagtccatggtttaatgtacatgaaagttcttgaaaagcacagaattacatagaaatgtatagtattagacacctgaggaaaccagagcattcggaagtctgtgaaagcgcagcttgcagcgtctttagcctgggaaccaagtgagaaatttaaacaaagactagcaataaaaatggctcctctttttttttttctggaataaatctaaaactcattaatagtccaggtttaatttagggtgtgctttggaatccttacaattcctccagatagcttttggaaagttttacccctgttaattaaattatttgtaggacatttattagccccagtgtcaggtttaaattactgaacccattgggtggtacgacataaaaattgaaatgaacagagaaactgcaaaacttaatcacaaagggccttatcttcctaggataaaacttgagaagcagcattcagctccccaatggatggtgcctacacacactactgcctgttggtggaaggctggagttgtgtaacaccagtatcccctacaatcacatatcacacagattagcaggctgcaaatggtaaccgctggagctatgatcctcaagtcggctgcagccttaaccatcacactatgaagagttttgcataaatcttgggaagtccttgaagtttctcagaaaggtacaggtccctagtgcctatgcaggcaaaagaggccgccatctgtctatgccatggtttgttcacataagaatataatcattgagttattgaggagtgaactcaaggcttggtcaagcagcaactgatgtcacaaggtccccaagtccacatttccacactgaccctagctacagggtacacactgacctcagggtcctaactgagcaccatttctttcctgggactgtagttctgctctccactcccccggggtgtgagacattgtctgactttaatccagttttctgttgtttttcccttgttacatggccacccaaacccaggcaggagaagagttctaatgggtcagtcattagcaccttctccagcttcccccgtgaccgccaacttttccttttcctgttagctgccttgtttttcttctcccaggcatgaattttaaaagtgtgtgtgtgtgtgtgtgtgtgtgtgtgtgtgtgtgtgtgtgtgtgtgtgtgtacttgtctctgtgtgtgcaggggtattcacactagtgaatatgtgtggaggctagaggttgatgttgggtattttctctccccatctctgtctttgtatctctgtctctgtctgtctccccccactcctcagatctcacactgatcctggggctcctccatttggcaagactggccagtcggccccagagactctctttcttcctcccctacagcatacactatcacttgtcctgtggatgctggggattggaatccagatcctcatgattgtatggtaaacacttaaccaactgagccatctctttagccctccaaagatataacttgttgaaatcccagcacacccattctgcccaaggaaaccaccataccagaacctcagaccacctggagtattccaggaagctcagaatgacttccaaacagagtgatctggatggatgaaggaacctgtccatcagagcaccccagaagacaccctcccacttcacactctttaatcaacaccacgtgggcctggagggggctttacccacctgagaagcgtcttgtgggaaaacagcatcaaacgcaaacatcttcgggggaacctggctgcttctcttctggaaggcattttgacctccacacgtcagggggtcatacaaggtgatctgcttcttccgtgggtccaccttcaggaaagagctggattctgaggtatctcgagccgacgtggaacagattcggagcatgactttcacctgttcaaatcaaagatggcaacatcatggcttagagagcaggctactgaatgatggggtggtcttcagcactcgacggtataaatattcctggcagttgtgaactttctcatgatacattatggtgaaatacacaatgaatcggcaagctaatcctcactgggtcaggggaaggatggtttatttataattaccaggtaggatattttgatatgtccattactttaaagcagagaaggtacactgtattctttgtcttcctattaatataaattaaaaattaactgtgccctggtggcccaattacatagatgaaaagctaatctggactgtcaggctataggggctggtgcagttcccttgaagctcaaagatcaataaaccatgcacataaaagttagcttcgtaatttactccccagctcggctcatcagggctctgggagacaaaaatccacagttattagtgtcatcattaaagccccatgaaacggactgtttttaatggccagcatttgaaatgcattccaaggggcaagtatgataaaagattagtttgcaacatgttatctgggatcccattacatgagcacggagaaggagaagcttcatttgggggaatgatagcgtgtcttgttggaatcaggaggcagtacatgctaacccaccttcaaagtcacagaacataagcatctctagtgcttatgaccagtttggatccaccccacatgaggaccgtggcagtcacggaaacggaccacctgctttgtagtcttaagttgggcagaaatcaagcagaaggctagcagcgatctggaggctacagtcctgggagatggatttagctctgttctcagctgaaggacacaagcctagcacagtgctcggcatatagtagacagctgcagagacaggtgatcttagtaatataatgtggcaaatagtgtatgcccaaggaggaatttttcaactcttgtcctctttgtctgactagctatttgagctgatgaaactcctaccatggttataattttttcgtgtgtgtgtgtgtgtgtgtgtgtgtgtgtgtgtgcactgtacacacatatggttcccatgtatgtgagtataagtgtatgtgtttgctcgtgctcatatgtgcatggccaatggctgatgttaagagtcttcctccatcactctctaccatatttattgatgaagggtctatcatttgaccccagaacttggcaattagactacttgctccaggggttccctatctctgccttccatatgctggataacaggtgggcctccatggccatctaaaatttacctgggtgctggggacacgaactcttgtactcatgttctcagggcaagttctttactgtcctaagcatctcccaagtccctggtcatccatgttttaataaaacattttaaacatacagaaatgttcagaaaaaaatgcataccgtactcagtaaagtgaggtctcagccctgtttgctgaggcctggggactaaacctcagtgtgcgaagcttaaccataaataattccaaggacaccaggcttatcagatgtctggtgcaataccctgcctatgattctcttcagagtcaccacgttccagtgtggggtggaggccaggggtcacgatgaaaaggtgtggttggcctcccagggttaaagctgtgcttctcctatgagagaccagaaaatacttactgacatttggaggtgaggcgctgtgttacacacaaggcctgtggcatcatctacatgaccttatttagtcctcctggtgacccagactatgggcacacttgtccagattttacagtggaggaaatggctgccacacactgttggacttcattctttctccaaagtaataaaacattctgcctagaagcaacttggggaggagaggatttatttggcttacacttcctggtcttacacacacacacacacacactggcttacaccactgagggaagtaaaggcaggaaactgaagcaagaactttggaggaactctgctggctcactctctgaatcacttggctcatgcttatctagctttcatctataacccagtacatcctgcctagggacggtaccacccatggtgggctaggcccttctgcatcagttgataagacaatccctcacagacatgcccatggaccaacctgatgaagatactcagttgagtgggtgaggctagccggaatcaagttgacagttaaaactaacaaggacacacagtttggcctatattgctgcagccatgaatggtaggactggcacagacttactagggccccatgttttctccttccagattctgcctcccatggtcaagcttcttggagcctaactttccccatctgtatggtaataatgcctgcctaccaaaaccgttgtgggacttgtatgagttgctgtgtgaggtcctatgtatgtaacagagtgtacagaagactcaattcctgttctccccactgcttgctccccttggctgtcttcctctggtccttgataggttattattttccaatgacaatgctgatgataaaactacataatgacttgacctggtttctgggtagcacgttacacaaagagaaccccagaacagatactatagatatggatagttagtaagcacaagataggactaggatcctactaggtcagcaccttcaagtcccacagccactgtgtactggacaatacccactttgattatctatctgccactggggcatgccctggatccccatcactctcgatagcctgattttaactgcactcacgaacaggtttgatctatttacaccgcagcatgctacaagcaggtatccacacagctacttctgaacggtgcctgggccccaggcttcctgtgagtgcctctccccatccagctatgaaccacacaaatcaaggatgctgagactccaggcagaactgatggagccccatggcccactgcttttctattttgcagttttgcatgccatctctaggttactagaggtgctagatgtgaaatgtgagctaagctaggcaaagcccacgtggagaagaaggcaggcaggcactggctcagccagccatatgaatggaaagcatatgcctgcatcttaatgaagccctcggtcccttttctgcacacgagccgaagccccagccttatgtctagctaaagagatacacagttctttaaaatcccattgaactcagcgctggagaaaaatgccacacttcattcttttctctgcagctcatttaaataaatggaggattttcctccttctaggaaggaaattgggtttttctgcttcgcctcctttttgtcattattcctttagtcctgcactccactttctgcttaatcctctgtaattaaggagcttaagagacaccacttatgatcaagaaagttcctcggacttcttgccaggagcccttgcttttgttgcaaacagtgttagattcttggcaacaaccctgccctccaccctgatcctcctggagagtaggagctgccatacacattcagagactagctcaactctcagggttaagaccacagtcacttccaagagtggacctgggacaatggcatcagatagctaaagggacagtctgagtggaggaagggaggggcggacacccagagacgggagactgccagtgtggaccaaagccctctctgcttgggagccactttgcctcatttgtctaattactcagtggttggtgcgagacagctgttgctcggggcagccattctctttatgtcttgctcattaatcttttcagcacttccaggtggatggcatcctgaggccggagagaaagggattgtgagacactcattgagcagagcttagcatcactctcccaagctgtacacacccttcatcaatgaggaggtgacagccgcctgccacccatcttattgaaggctgagggtgagcacttgctgccactgttacacatggccatggccagcagacactgtcgttggtccccagtcatcatggcacagaccacctgagatgctttgttgtctgtttgtctccctagaagctgtcagtctggagggctgggttcagctataacactccagaggactctgggcaggctgacagttccaagagtcccttagcaatcagaaagactagacaaagcaacgaggggccaaaacaaaacaaaacaaaacaaaaaacctgtgttcattcactttcatgtgggagctcactgaagtcccttatgtgaacacctacagtgaaagcccttcaaggataagtgcaagaccagggactgctcagccacttggctgtaatcaatgctgagtaagaagatatttttcctactcaggctcacagtgtagagcattagatgaaccacagaatcattctaatcctttacacctccatattctaattcctttaacacagacttttaagaaaaagttcaggagaaactggtcaaggtgaagatgtagcaacctactgaagttgctatttagcatcattttagtctcatctgggcaggactggggttgtccttaagacttcatatttgtgagatcctatgtcacctatagaaacttccccaaaaggaaacagaggcaaattgaatggattcattagtgaggtgtgttggtacatgctggcaactctagtactctgggggcaggggcaggagaatgctgaaacctgaggccagcctgacttggatggctaagactatgcagtgagacttagtctctgaggaaaaggggaaaagattgccagatgaggatccaaaagcaaaggttgctgggtatttcagtggtcaaccgctagcctaacataagcaaggcctacaacacacacgtgcatgcaaaaacacacacacacacacacacacagagagagaaagagagagagagagagagagagagagagagagagagagagagagagagagagagagaaagagagaaagagagagagagaagttatcattttagacaacacaaccaaaccacagagttgggcagtagctaactccaaccaagggtccagttttctccacactggaacaaatggcagggatgggatgccaggattccttgtggaggcaggtgacagggatactgccctcagcctcacatgtgggttgaaggctgaactgaggaggacacccctgcttagagaaaggagatggagggtcatggtgtccttgggatagattgggaggcctttcccggtccgtcctgtttttaggtaagatccagctacgagaagaaaaaagagcattgcagaggagctcattgttttttaatggacacctgctgttcctcacagacgcaggcttgtgggtgcagagcaaaccaggagtgggactgggttctcacttgggcaacatcaccaaggcattgtgtgtgggctttggcatccttggccttgagatagaccttctgtgctacctcccttgacagacagatatggagatgaaagacagaaaagctgcttacaaagcagcacacagaaccaatcagtgcagacagctccccacacctgccatgtccatctgcattcaactgaccacaggctgggaagacccaggaaaaagacccacatgccctaaacatctagattgcttccctctgcatcaactgccgaatgctacagtacctatcgcatgcacacagtaaccatctacacagccgctgcatggtgccatgtactataaccagtgtccaggaggaatgcataggttatatgtaagtaatgggtcattttatttatgtgacttgagcatccatgcactatagaatatgcaggggttcccgggctcagtcacccagaaatactgagagatggctgtattatcttcagaaggaaggtagaaattcggggattgggagtgggggtggcaataggttcctttccctcagctctactgctgtaaaatagactgtgcccatcaaattaatagcagatgggattggggcaatggctcagtgaataaaagcacttgctatgtaagaatgaggagttcaaatctccagcaccgtgtttaaaaagtcgagcatgatggtttgttcctgtaactccagttatatagtgcacggcaggggtagggtggggtcatagagctggaaaactccagagctcactggctggccagcctagtctgagttaactttagggctctgtgcgcttgcacacctacccccatgtgcacacccctagcctgagtcaactgttggcctctgtgtacttgcacacctacccccgtgtgcataccccctccaccacatgaaaatatcataaagcaaaattaagcacacacatacaaagagatgcaatgaaaatggtttctctccttcctcctgtcaaaactacattatttttttttaggtgagtaatccatacaaagtttgatctgtacacctaaaggctaaatgagatattttatatgctttatgcctttcttctctgtcttggtcagacaataggatgggtgggctcactggtcacagtgtctttgtcacattttgatgacactggagagatgggagatctacacagtgtacaccccccactcccagtgtattcccctcacagcgtctgctgtaccgagcaaccctccgcagctatggcattctgacaaacacatggcaaaagaccttgatgaagtgcccgcttttagaaactcactgcaagggattaagtatacaatttcccagctgttatttgaagagcccctttctccttaaatattataatgtaagattatattgctagcctgacaaggggtgctgttcttcacaaataggagttttttttctctaatttattcagggtatctccttagctttatagatgacaggcaataacattaaagtaaattaaaatcaggttttatacaagatgaaagtttatatacttccctgataaaatttctaaaagtgatatgaaatttgtttttttttgttctctctgtctgtgtgtatgtgcagccatgactacagagaacatgagagaatgtcagatgtcttctccatcactctctgacttagtctcttgagacaagggctctcaccgaacccacagttgtcatttttcagctagtctggtagccatgaggcctcggcaattctcctgtctctattcccccgaccacagcacctaggttacaagcatgtgtggtcacacccagattttctacaggtaacagggatctgaacccagatcccatgcttttgtagccaacactcgcttgggccctgaaatggctttccctggaagcaggtctccatggtttcatgaaattgaaaggtttgaggagaatggatgagaccaggaggttcctgttggacttagtaaagcctgtaggtttctaataactccaacactaggaaaagccagggagaactgagacaattgtactcctggagctggagctcatagcaatatctcacaatggcaatgctccttcaaagcatagccatcgttgcaggattgcatcgccacaccaaaagagtcctcggagattggaagcacagttcagttgtgtgttacagaaccctttggattaagtttctttgcataaaaatgcagtgtcatccctcatgacatgtccagagagtggggtttttacttatccacctagaggaagtccagttccatgcgacatgtttggaaggtggaggctgagattcactcgggcttaccatgggacagtctgttgtgttgacaagagcaagtcagtaccagcacccttgctatgacttctttacaagtttcacagaccttgcagtttatcgaaggttcttatctgctttccatgtgtttccccacaccagctttgccaaggaaatgccatcctcagctctgcagcaggattcctggcccaggtactgcagtaacttgcccaaagcctggctgtgtggccttgacctgcttctcttccaggatgcatgcagagctgaagcatccttgaggacatggtcgggagctggccaatttcttctccggggaccgggcttttcagaggtaacatgaggtaagtccgtgtggtgccagacagtaagtaataggcagccatgtcatcagaggggagatttacactattaaaagccaggctggggaaggtgacaagtggggacacaataaagctaagtgtgagggagcgtgtgagagaccagaaaatggagcctgctaatgagatgtactcactaaagaagtgcttgggggggggtggagggggcccagaagattccataaagctcttcatcagccagcatctgtcaccaggcaagcccagccagagtctgcgaaacacggggtgtggggtgggggagccttgcctgtgaagcactgctaatggctggcagctttgggaacagagtccctcacaccaattagtaggcttgggcgagagcaggccatgcagctgaggacagagacagacacatatcaggggccagtctgtcagaaaggactggaactgtgacagtagcctatttagaagacactcctacccttagctcattctgttcagaaaacttattttaaatggatgagccagcattgacaccctgcgacaggcatcttcaggcctgattgaggtgggctgtgggattcggagttttccctggaagattcactccaatgtcaaggatgttcactgtcagtttcctccctgtgatttctgggacatagagctaggtgcctgggccacaggctgtggagaagggctcagtgtctgagatctagaacatttgctgatgtgtgtctgtggacaagggatttaacctctttggtgcctggtatgtaaactggtcacaataaggatgctagcctagcagggtaccgtgactattgtggacccaatggctacagagaacacacttggtagcattagtcattattgcctcacagccattcctgaggcaactgggccactgaagggaccatgaactttgaagtcagacagatcctggctcttggtagccatgtgatgaccaatacattgtttaatagtctccccatctctaaatggagaatatagtcccttttgaaactagttaatggctaaacatattcaggcataatgtcacaaatagccaaattcttaggctgttttccataaaaagtcttccaggatccattcaaggatgccttgaaactagattttcaaaaatgttcacaagaaggaggagccaggcccttgcctttcaacaacaaaagctcaaatgtcctgcatagaatgtgacaaccacctaggagcacacaatgggaaggggcaagagcagcaaggacacctgagctgcttctcagccaatcacaagtggcccattccctctctggtctgtagaaactgagggaccagcagatgtgggcgggggcagatctgagttggtagaccttgttggatgaccacacactttgcaataccccaaccccatggcattggcttctgtattcttaggctgtgggccttgctccatgtcaccttcacaagggtttgcatgattattaatcaaacaattgtgcaaaaccctgggaacagagacctcagcaagtaggtactgtcacatgaactacacccatgatgtggtggaagagtcccttgcctcaggaacctccaggtgtgcatgacttctcccttcacccagcttatccaggagttcacaggcccaagtcactaccttctaaattactgacccacggccactatttttttttcatatagaattctagtgaaaactgaagagattcacgacatattgtgtggctcaatgttgcacttaagtatgatgttgttctcaaaggtggtttatctttttttcccactgttctcctacttttaattttgtttttaaaaatgtttatttttattatttttttgagtttcatatgtgagaactgcatttacattatttagccctcattttctcccctccaacttgcccctcaacctaagtgagtgtccctcttccttaactatatatatatatatatatatatatatatatatatatgcatatgtaatacaacctgctgagttcatttagtgttgctcatatgtatatgagtttagtgttaggattggataacctacaggggcttctccctggagaagactgattctcctgtacctctttatcgggaaccttgtgagatttctcccatccacactggtgttatcattgtacagttcttgtttaggaaaccatatcgttaggatttcatgagcccacccaacttttacaggagcaaagttaagactgggacttccagtccccaccctcctctgccccttatctgatttttaataaacactggctgataatgattggagattttctgaacattaagtagaaaagagaccattgccagaaataagaaatacccagtggtgcaagtttgtgatctcagctacttgggaggctgaggcaggaggattgcaaattcaaggtctgattgggctatagagtgagtgcgcagccattgtccacaacttagtaagtaagatcctgtctcaaaaggaaaaggaaaggaggggcatgggatgtggctcagttgtacagtgctcacctagatgtgaaagactactgggacattgggtttaatccctagcaacaaaacacacacaccttaccacacgtacacaaaggagcactgaaggagtttttttgagagagacaatggtcacttcttaaagttatattgctttcagatgtacccagcttaggcttttggcatttatatccataaagggcccggttcccaccaatgctaatgttaccactgaagaggtgagtagcagatctgtggctacacaagcaagacttaggcactgtgtctgctgatgcagcctgggctatcactagagagctgctgtttggcttgggaaacaacaggcaggacaaggggaagggtatttttccttttgaaacccgctacataaaaaaatgagaaacttcagtttgctgcaggtcacttgctttgctgtctctagtatgtcactgctgggttcttctgggtcccaagaatctcaatatctcattgctcctggattttgacctagacaaacattttatgataaataatttatctatctaaaataaaaatgtcagcacccatgatcacataattatttggtataaatctttcttgcaggtatgtctttagtccatttgttttatgaatccatcttagaacaatatccacacttgttcccaggctttattacatgggtagcttccaggagacaatcttgttcccgatagtaacattaatgaatgatgtttgcacagggcctggtgttacaccggtgggagaggaaattagtctggcttctacaggctgcctggagaaaaagagcagggtttatcatctccagcctggtggccaagaataggcctctgtctcaggcttgctgggaggctgggatccagaagggctggggagtgttcccttaaaaggccaggggtatgtgtgttcacacacaggaggttctgtctctggagcctggagctctcagccatagactggaggaagagagaagaaccaggaaccatcccagaagcaacgacatcagagggaaccttgagattaagagggcagaacctggaatcatctcatccaaagatttgagttctagataaatttaatttccactgaaacctgacattcactccacagtctcatgtccaccctgacatacaaagagtaaggagcaagaacaaagcaagtacaccatgtcttggtcccagatcgctgctccttggcaggtcttggagtttcaacagtaaggaagaataaaaaagtctaataactagccatggttaccccaattctttctcctccagtgcctcgcaggagggtcacacattcagaagtgcacatgttccgaccactgaagtacagatggctcacacacttctgcatagcagcaatggcagaagggagaggggcgtgataacaggaacggggggggggggagggcattgccacttctatttgagagctttctctattttccagtttccatcccagaacaaagacaactccaattctcagagtagccccagtgagcctcacactttccactctgccatcttgttggaagggataacatgagggggaggggaacaacacgctggtaagaagagctgaggaaacctcagctggaagacaggagcctgtgccaatatgactctcctatcacccgccctcccggggccagcttctgagccctgtaattccctcaccccaccccctctgccttggcagagggacccttgctggcagcaggagacaagtacaaagttcacaagcaggttgtaatacagaaagtgtctttcctgactttcctttaagtatgcgtgtggaagatccactagagacaagggagggaagaacctagtaaatgtgctatttgcttaatcatggcctgcaccctctctcctccacctgtttgctaagatccaaagctaacccagtaacacagaattcaattacaaccctgttacccacagtgacaatcctcctcaactaaaaggccaacccaaggagctttccctctgccactgaggggtttggaaacctcaaatgaaaggtagtcagataaaattggagaattccagagccttcctgacacccagggtttgaaggaaatgtcagaagcaactgtcccgggagggcattgatgatctgtagtcactacagccatactaaccctaaccctgagcactaacttccttggcaggtccttctgcacggcacagagttgacttcctcaaagagcaggatgcggatgcagatggaggctgtactcagccacttgtgccagggtcacagtgaagcagtgtgactgggaggagaggtcaggccctctctgtgtgtgatagtacacacctccaggtgtcatgatgctctctctgtaaagcaatgctaacaaggccatgggcttccttccagtttcggcagttatgcaaataagagtcaaagtgtgcaacttatgcttttaaagcacaggattcgagcgtgaggactgactgatgagtgtgtgcaaagccagggagaagacacacagctgtggagttcagtcctatgcagatacgtgtcccggtgctagtgacagccacatgtgctatgggataacaaagcagtcaatggacggcaaaccattctttacctaggaaagctaagtatggcagcatatttacattcaaggaagaaacctaagacagacctacttcagaacacacaagaagagaaagcttgtcatgaacaaacccacaggaggtaggtggcccttaccacagcaacagaatacattgatagtagctagcaagccagctgataaccatcttttctccagtggaggggacagtatcgctggctcctccatcgaggggcaccaataggatgcttctccatttggactctgcccattggacttgcatcatgaaagggcagtagacatactatttaatctgtccacttttggaaggcatctgcctcagggcctgaacttcctggagagacatcttgcttaagtaagcacaggtgccagagaactggtatcatagatgcacacagggagattcaagtttttcttactgaagaatgactctttaaggcttcacttctgagtcggaagattgctgggtcccctctcagtttctaattcaggtagttttgggtggagccagacaatgggcattgttagcctgtttccacccatatgtggattacgtggccatagagatgcgtggaggaccattgcctacgaagtcagccagactcatcccaaaggactctgcctcaagctccactgtcaataaatacacaagatctgtgagtgttccatccttgcaaacaaaaatcttatcaatgtttgagatccaggtacctaaggaaagatctttgctatgcagggctctgggcgggcttagaagggggtagcttgtccagcatgaggttggccctccccgggctccacggcactgcagaacaaagagttgtagtgagttctcaccgctctcagctttgcttgagggaacctccatgaaaccaggttaagtgttagcacttgagcttgaagatatgaacaggctcaggagctttcatctttatcatcgccctcattgtcattgtcatcgtcgttgttgttattgaatgtcccacaatcgaatccaaaccaattcttcctacggagtcttgccttttatttttccttaaataatcacttatttaaaattcttaataaaataatacacaaaagaagccaacgttaaaagaaactaacaactttttgagaccattcttcttgatactgaaatgatgtgtgtgtgagtgtatgtgcatgagaacacaaatttgactgtgtgcatgtgtgtacacgtgcataaaatttacaccagggtacagtgaatgagtgtgtgtccgtgtccgtgtgtgagtatgtttgggatagtgtttaatgattttatttgacaaattctagaatgaatgtgtatacatggttgagtgggatggggtgacgattaaccttggttgtcaacttgactgcatctgacattaactaaaccataagacccccaggtcactactgtgaggtagtttctttaatcagatcatttgaagcaggaagacccaccgtaaaagtggacatcactctctggcagccacctggatagaaggacatggcaggggactttggtgttgtctgcttgctcccactttcccttgcaaagttctctatcttgctgctgcagcacccgctctccaatactagatagagtctacttcaggcctccaagagtagtctgagggccagtggctctcagggcatcctctaggcctccactgccagattgggattgcagagaagaaactactggattctcagcctcttccatgtgagacagcctatgtggactgaatcctgtaaagcaacctaataaatcccatataattttatctatctatctatctatctatctatctatctatctatagatatagatattcattctatcaagttcttttcctttagtctaatatggatgttcaatttttattccatgtggaaaaaagatttgaaaagcaggggacttaggatgatttcactcagccataattcctccagattgacatttgaatttgatggaacctgtcactaaaaacatatgcttccctggatggggcagagaagacacaacattatgcattgttggatacataaacactggcaacctgccagtgtgtcaacactgaaaataaagacgatgtaacccagatccatcttgaggcccaatcaggtaccaaggatcttattaagatagtacccatctatgacataatccagacaacaaagagccctcaggcaccactgaaagggcttctggtaccccctgcccaactcagaatgaactgattgaataaactctcattcgtgatgagaagcattcatctttaaacatgaagtattgtagtctataatgacttttcctcagaaggtacagaatggaggtgtgtgggtgggaccagagagcggcaggtagctttgctggaaatgtttacagagggctgagtcctgtggctggtattcatatctggtgattacatatggcagttaggctgcaagtgaaacccacacgtccaaattaataagattgatttgggaggggacaggagtctgccatttgtatgtctttagagcctaatgtcactgatggctcttttcacacagttggcattcagtcctgcaggcccaaaatgttcttaagctgcgagatagaaagcatggctggaagagtcttgcctgtaaaggttctggtgatgaaaggagactgggagactgagggacaagtgctctgtaaatagcgacacctcagatccaagactgacggccttgtgagggtagccagcagccggctctttcatccctgtatctctaggtgtgggtgacatgggaaggacagggaggttccctgggtgaacatgggattgggagcctggaattacaagagatgaaggtgagtgagttctgagtgtggctctgtcaggtctgctttaaggataccggggactttcatacttggtcccagttcatgcatgcggttcagactcaatgcgtatccacagatgctgaatctccactttgctcactcacagttgtcctctcatggaagagaggctagaaagaagggcagaatggctcccctaaatttcaagggagacgattcaagaaacaggatgcaagccttgctgtggctctatgatctgtgtgtttgcccttctgccacactgactgcttgcaatgaagaagcaatacagcggcataaatcctctctatcaagccagccaattgcatataaattgtacacaaaacagatctcaccatgaatatattcacagctgccttggcaagttttatggaactctctagagtcattttccccctcgttttcctgtggcttaacttgctgaaacgtattttaacacttaaaaaaaaatcatagactctgattaagtataaaggactttttaatttgagattaatggtctgataatgtgtaaaacaactcaaaattgtgtaaatttgtatttgggggatttttccaaaattgtaaattatcgacatgatggattgtaacaactcctttgaaactgttctgcatggctattcaaatctttagtgtagtttattgacaggttgacaaatacaatggcccccttggggggcacactataaactcacaacttgtgtagctttctgcaagcaggacctgctaatcacttggcagactgaggcgggctagcactaggtgacatgaaatttgccatccttcttccttgtgtgtctgatagatttgacttccagagaccatgaaaatccttgttcaagtcttggtagtgtaccagcatatagctgtgcccactagtaccgcagtgtggggacaactaatttactccaccaactgaagggagttggccctcattgatattttcagataaagtggctgaggtcccgagaagttacgtctacaaatccaacagtcagacatgctgaggacaccattgcacttatgccttctgccacagagatccttgggaaccagtgaatgcgactgtggactctccaataggaagtgaaggctcctaagactgaaaccaagttggccatcttgcaaacagaagtgtccccctacacacacacacacacacacacacacacacacacactgaatattggtcacagaatgagagcagacacctccaaacagaatgaatgcattctcccatcagccctctatcatggatttgtcaatctatctactctctaccagggaactcctcctccttctcttcctcctttctttttccttttccttcctcctttattcccctcctcctatgtctccatctgcttttctttcttctcctcctttagacaatgtctagctacatatcccaggctggcctcaaattcacaattctcctgcctcagtctactgggtgccgatgtagcagtgtaacagggagccttaaaaccacacttgaaagaattataatttctctagaaatcccaccgtggcatgagtctggatgccagaggagcggccatcccttgggaatgagtgctcatctcatagttcccataagtccacacacacccatctttgtttcatcttctctataagttgtcactgcagtaggaaaggcagagagaagcttggccatttcctctcctcagtccccaaattccaaacaagctctgttctttactgattcccgactcccagttttctttgggaaggcatcaagcaaaaacaagagattctggtagttgagatcatagaatcttgtatctactttcattgttttgatgattgataatgaatctttcaacaaaacctagtgctattctgatcaaaggcaaagcctccgacagttcctggtttgaacttgggtgtggccaggccaggatgggtagagagcttggtgactcttcttcagacagatcccactcatgtaggtctcctaagcattaatgatgtgtctgaagaaacgatgttccaaacggtactcaagagacctacccctttaatgccatcgcctctgtgagttcgaggccagcttggtcaacatagtaagttccatgtcagccagggctgcatagcaagtccaaaccccaaaaggttaacacttagaagtatatagttgtttctcttctcatgtggaatccgtatttaataacccagctggcaagtaagctgaagtaattaccgtgtcactgtgtcccacacagccacgactgtcagatggaagctgttgagaaagatggtgggcactgaggaaaatagatgaaagaaaatgaacctagggttttcctcctcctgggcctgtgttactctaatggcagagcaaacctcatgttgtcagtggcaaaagagattatctgaaatagccaggagcgactctgcccattattacagcacagaagaacgaggaaggtgatgtagaaaatgatctcagggcttctctccaaaggcagtgtggccaggctctgacaaggagatccgtgagtcccaggaagccaggagggctgtgctgagaggccggcttgatctgtggtggacaacaccttctacagcctccctgttcgctccctattctttcccattctccttggtgcctgggaaggcagggattctgggctttgctgttgtaagtcccgggctcttagtttagcccttttggttttctactctatgcatatgtttataaacagcccctttactaattttggtgtgacaccactttctgatcctggatgctctgcgttctgcgtccatgggctcatgggtagttatcggaggttccgtttacaggcagtgactgcacttggaggagagagggcaggggagactctggtttaggccactggtaagtggtagaacgtgggtgatggagtgccggggggggggggggaccctgttcggtctgtcagagctctttcccactgttagcagctgttctcagagcatcgctgtggggctggtgactgaagaggctgacaccgattttatttatttatttgattttattcccagatccccagctagaaaaacacattgacgggaaatgaggcctcagtttcaataggggcagacagtgtggaaaccctgctttttcatcaaatgttccctcagctgtggtcattctctgacaagaacagcacaaagcggggaatcacctcagactgttgttagtggacatcaagactcctcttgacccccacttgatgtcttctccctatcccctacaacttcccagctgtagaagtaaaaattatttattcaattaattaatcattcacttatttattttttgcaaaggctctagaatgttcttttctaatcaggtagaaaatggggcattatgatccatgggccagtgacagtgagtcagtctaatttgttttccccctgtggattatggcctggtggctgggaaagaaataaaagtcagaaacacagacaatactgttcattcaaagacttataaaggggaagcagggcagaaaaggtttaggtggaatctaaagcagtgatttattagagtaaaaccagtttctggtaatacaaccaaacactcttttttctccctgcagtttttcagctcagagctttttcctacctaaagtaacttagtataagagttaggcttgcttcagtaggactggtgttcctgggacaaaagactctctgagagttaaataggaccaggccagtggcgccgcacagccatggacagctctgcagaacaaacattagttagagcagcctccccaccaggaaccccaaggctttcgttaccatcacccaaagggaacacgggttcacacccagccccagagtctggcttagctttcaactcttggtgtctgtgctctgagatccctgctatctcggcttgccatggtccatcagaaagaacagtgggccaggctctgcttggcttctcatactcagtggctttatatgacctctaaagtggttgctgagaggagaggtgcaaaagggactttgcataaactaggcatttgttgtactccaccttcaaaagattcaagacttcgtaggagagggttgaattcagtgagctgatatccatgaggcaggtggattttgccctggggcggatactgagatgtcatctccctctcacctttgtattctcttcgctaaatctgttcatcctggacacacatgtcacaaggttccaaaacacatcatgacatgaatcacccgtagaagagctgaggccatgtgactttgtcgtggcctgtcctttgatctttacctctgtctagcagtataggggggcatgtggcaatgtcaggggatgcctttaatctcaacttggtgggtcctcctggcttcgggagggcagaacattctccaagacacaaagcaccctccacccccacccctgcctagtcacacagttagttacctaactcaatacgttaacagtgccatcattgaaaagccctgcttgggatctctgctttcttatatgctaaaatgaaagcttgaaattatgtcattaaaaaccattttggagactaggttctgaaatgcagatgaagtatttaggaaggtatgtaattttacattaagtttggatgatgagaatcacatatcacacatgattctaagacacaaaaattaattttccgaggtatataaccaggatcacagtcagtcatgttaacagtaagagaatgtcccgacggctcaggcagtccctcatgtaataaagactcgaggaactgtactgtgttaacaaggtgtccagcaaggtgttcatttaatgggcagaaaaacaaccccaggttccaaatcccaggcttccgcttacgagagtctggtgggaagtgatacatacaaaatcccctttgtctaaactatgagccaaacagaaagtggccagcggtgattcgtgaggaaataagtttctggaagatctggatacaggagcccttctccagcccggtagaagatttggttttccagaacacaggaggcctgggaaaccccagggaaccctcttggctgtccatacacagagtgcaggcttcgagatggacagcaggtgaccagttctcaataggatacatgaccatcaggagctacttgtgggcagaggtgcccccactgggctgtccattggcaaaatgtaatagcaagaaagccctggagggcttctgcattaacgtccaccctggaaaaagccacaaatctccatgaaaataactgatggcaaagatgttaaagtgaaaccagggaacctaaggataaatggaaaagtctaattacagactggggagagaacagggatagacagaccccagcagcaacagtgctcatgggtggacagatgattgtggaatgcaaatttgaagccctgggatccaggttcacggaagctctggatgacttacagatgctggtccaacctcacaatgaactgtctgggcacatgctatcgagggacacagactgggactggaggtgggagcaggaggaccaggagttcagggccagccgtcagtaacaacgtgaggagctcaaggccagcctgcgatacaccagactctgtctcaacaaaacgaaacaaagcaaacaaacaagcaaaaacacaaaaacaaaaacccaaccttgggactctcaagggcttctttcatcttcatattccagcccatagctttcagattggggcatgatctgacttttcagatgccagggcttggagggttagacaacagtggtgaacttgacacttactccacaaactatgcaggggccggaagtgcaggaccacactcctcagagcctcacccatagttttgttctctgagtgacatggagtgtggcttagggatacagtctctgcatgagaggctgcagattggtctccagatgagcaccaatacagcaggacagcagaaagcgcagcctgcatgtgctcaatggagaacgtgcttcggtacgtcaacaaaggtcagagagaaagccacacagaaacaaaacaaaaggaagaaagaaagaaaaaacaggaggaaaagaccacctctattaatgcccctttctaccatttattagatttctgttatcatgttaacaatgtaatggatttcaagtcttcttgtcacatcattgctctcatgaccaagtccggtgacttgaaaagcccattctctgaggagagttaaaggatacagaagttagtgtagtcaacaacccagcaaccagacacatctggggggttgtaatgtaagcagagaagccagtatcaggtcagtgagcaaaatctaatttccctctaatcgtgcacgggaaaatgtagatacatcttttcccttgagaagctagacttctcaaaaatcacatttcctagtcttaccattctttgaaaaaaagggtggtgccatgcaaggatgtagaaaaagccaccctggctccctgtcaccctgtgctggtcacatggtcacagaaggtgatacctctttggcctttgcaaacagagactaaggaaaaaagagtacccagtgaccccatcaagagggacaatcgaactccaacctccaatgaaatctagaaccttccagggcagataccagccctagtgtaaatgggggtaacatgggctccttctggagcagctctggggccatttgcaagcccctgccctccttgtttgggtgcctatttgaattgaataaggtctgatttaaaactggtcaaagtacctgtgtcaaccttcatttccccaagtgtttcctcctcagccaatggccaataacaaaaacacagcagggagagggaaggaccaaaccctacaaggcaaaactgagcagtgaggtgaccagaaggaactgattttgggaggagactaatcttcatacatttatttaagaaatatgtggcttaggcaaacctttaggatttaataaatagaatcagtattttaacttaggttaaatttgtacctaagcatcctacatgtaccatcaggggccatagtggggtgtggattccttcatttctcaacaagttcttgtgatttctttctttctcctgttcttaattctgtgtgtgtttcatttcagttagaaaggttttgctcctcctcaggtctgggaagaatgtcaagaactctgttgatgtgtatatttataaagaaattcacaccacagaaccgaagtgttctgagcaggtgccagggaacagtgggatccaccttctggttcttagcaagcaagggtgctgctccccccccccaacaaagacctgggcatttgagcagcacggggcctggtgactccgttaacttttgtccagacgggggtttcatgggtcatactaaataggaggaaacaagtgctgtatggcaagcctggtaccttggatgaacttgggaattagcatggagcagatgcaaggagcaaaggaaaaatgctgggtcaattactcccaggaaatagggactgcatagttaggtttgcttttttagtttacttttatttatttctttttctgagataaacttacacaacatgggctttcccactttaaacagtgtgtgtgtgtgtgtgtgtgtgtgtgtgtgtgtgtgtgtgtgtgtgtgtgttggtatctgtgcacatgtattatgtatggaggccagaggacaattttgggtgtctttcttcaggtgcaatctatctttggtttgtttctttgagccatgctctctcactgacctgaaactacccaagtagcctagttagcaatccccagggacccacatgcctctgccactgaaattacaggcaaaggccaccatgcccagcatttttttttacatgcattctggggatctgaactcaggtcctcatgcttactcagtgagcactttaccagtcaaaccacctcccaagcctcaaatcagtgtgtgtgtgtgtgtgtgtgtgtgtgtgtgtgtgtgtgtgtgtgtgtgtgtgccctcgtgtgtgtgtgcatatgtgtttaagtatatttaaatgtacaacaatcactacataatattcccatcagtcacaaaagaaactcaatgcctccaagagtgactcacgatgcctctcccccaaagccttgggaacctaatctactttctgtctctatggttatggctgaatatgaacatttgaagggcttctagatagatgccatggcaacattcccacatgttctgagaccaacaacaagagggcataagagcagagtcgggtgtcccagtgggaggtgatggctgcagtgccagcaatataggtgtgtgtgcctgagaatagcccaggagtaatgcaagtgtgctcaggccctgctggcagaaatactccaccaaccaaccatccctggtacatggtgtatctatccccacggagaatcaagagtgaaacgatgaatcactcagggtctgaaatgtgaaaacataatctacctcctccacttcctgagttcattactgcctcagccaggtcaaatgacaagaggtaaataagtcctatccaggggccaccaaaccagggtgatggaggagtctcccctgcctcccagagcagatcccctagtcctaggtcttgcagcacctgagaggcacagccatgcaattccagctttgtgtgcattggtctcacttgtcatccttagcggataaagctattccctgaggatgttgttctaacagaattctccattgcagggctgacagcctgctcatctggtctcaagcaaggtggcataaagatggaagccggccatgcgtgtctgtcatttggatgattagcccctctgacagtggtgcgtgcctctttggaagtctggctcttcttacgagtgcaggatttctcaccaggaaatcattttcctgttcctctcaagggcagagaagggcgaatgtcttcacagcaggtgaacttcaggctcactgaagaatttgtgtcaatacactgcagatgagtggcaacctctgtgcagcatagactgtgtctgaatagacttccctgcacccgggagctggtgtggtaactcctcttcagagcgatcctgtgactgtctagactccagagaagggctagtcactttgactaaatgaagcagtcacctagcctaagcagagcacggccacagccaatggacgcacacctgcctagaaaagccactccacggggaactgtgagacagttcacacctgggaagcaacagtagcagtggggcaagagactggtctgtccggaagtctggcttttctattcctctgtctaggaaccaaatgacttttctcggctggagagacctcttgtcaatccacaacagaagcagtgtgggttgtggtaaagccacaggaaagggtgaagagatgggtgatgggaagtactcaagggcctgagttaggacccctaggacccacgtaaaaagctggctgtggctgtgcgcatctggaaccccagaggtggggaggcagagacaggggctttctggccacgtacatagtctagccaaattggttcagtgaaagaccctgccacacaactgggggaggtgggggagaagccactgaggaagacagctaatcctagcctctggcctctatactcacacacatgtatgcacccacacaaacgtgaccatgtacatacacactgacactgagaacagaacccccaatcaaccccacacccctgtccataactgtttagcacatgatactaagagcaacacaactactggggccaggggagggttgacggcttcccccactgcaagtacgcatagatgtcttgctgaggaagcagtgggtgacaatcctggctcatgagagtctttgccactggggttcttgccaaggaagggctctccttttattcatacacttctacttcaaaacatggataatgtctggcagaacacagttatgacttcctttctggcctgaaagtgaccgtatactacacaaggaactaggaccagcccaacctctcaggtcactgtactcagggacctgcccacagccacagcatttgtgatggcaacatctgaactgctatcagagtttaccatgtcaagctctaaaaactgtgggaattcacctttcttccctcctatcattctgaaaagcagaacgttctagggactgtgacatctgccgtggtaagaagggacacatacacatatcgagtttaggtgtctgtggggaaaggcactttgcacatgctacaggaaaaggagtcctctccttatcctttggagttgctgcgtagagtaactcaaagtggttcacagctgacactgccatgtccctactgtgtgaaagaggaagggagctttgtccagaaccaggtagtggcactactgtgctcgggagaagggctcagtgtaggagagggccagaacatagatcctggaacatattggaacagagggctaggatattctgtcctctagggagaactggtcaaccaggaagggagagattagtagatgggacaaatgcaattcctcagtcactgaagacagcaatatagatagggaacataaggcttccatgtagccaagggtttctaggaaaggagccaagactggctgaggctgtgttgactcatggctgcatccttcatgacctacctgggacagcaagggaatgaagaaattatagaaacatggacatgtgtacacagaaaagctgagattgtgtggtctgtgctctctgaaggagaagctcagtgtgtttattatataccgctaaagaggaagcaggtctatttcatacagacaacaaggagacagttactgatacagccgaacaaggagatagctttagctaaggtttaggaacagtctctgtaggggcacagtctttaggctgtaaacaaccacaggagaaagctatgttggatatttcctgcacacactgtcaacaatcacactaggatccaaaacaggctttgccatccttctgagcctccactggggaaggctttgccactcccattggtctgaggcatgcggctccttgacatggttgtaagcatgtcaacagcacacattcactcaggacttcactctctccagcagacagggagagacggcctgaaagtgctatgggcctgacagaggaaggagcaaggtcaggttcaggattggaccttgaagatgtcttcaggaagacgagctaacgggcatcaactgctgatttctgcctttaatatgcacattccagaatcatgtactgatgacatcaaagccatccctagaatgaacatgttattaagagctaggacctgtgctggggttcggggccagagagagtgacaggatgcaaagattcaatggtggcaacttcaaatcctcatgaggaattctctatgctgtggaggaggtggaccaatgatggcaagacagacagcacaacagtacaagctaagggcagtgtgagagggagaggagagtggttcagtctacacacagagtaatcctcttcagcctgtgggtcgtgacccctctgggggtcacagattagatatttacataaggaatcataacagtagcaagattatagttatgaagtagcaatgaagcagtgtcatagttggggtcaccacaacataaggacggtattaagggccacagcattaggaggttgagaaccactgctctagaggaacccctgggatagaggggctggcagataaggaaagcacaagaaatggtgatcacatgcaaacaggtctattgagaaactgttatacggaaggcgactggccaacacaccatggggacaacattgtgtataaaaatcagaacagatagtcaggacccaaggcccgagtctgaggtggaaatgaaccaaaccagcagagtcaccaataagatctttaccaaatcatcactgagactcccatgaagagatgtgaagctccttctatgtaagggtctaacctaacaactgccccttgtcatgaggttttgccttttgaagagtccgttttccacagtaaatgcagttacgataaattacactgccacttgagctagatatggattcctgtgcttcctcctttccctagtttctctgtccctagtacactatctgcaggctgttaagaagctcttgggctttgctgttggaggtgggcacttcgtatggagaagtgctttaaacctgaccagagccaattcacagagacagtatgaacctgggcaatgactgtagacttgcaccatccaggcaaaaaacaaaacaaaacaccccaaaatggtgattagtagttacctagggagacagacacagttctgcaaagcctctacaggaggaggtgagttgcagagggttggagaaccctggggcaagcctgatgccaggcaagaatctgtcgggatcaggctagttgttgaaaatactggtaaaccagatagactttcacacactgtggctgctacgatgtgtacatatggacagtggagctgagccaagtcaacagaggcagcacgagcagcaaataggcttaggactctcatctctaagagaaatgatcccaatgagctaaggcatgcaaatgtatatgcaaatgacccagtgtatataaatgtagtattacgaatgggttggtgagtgaaagtattgtgtatgtaaatgagttggcatatgtaactgtactctgaacatagaaataagtgattgtatagaaatgtcttaggtgtacaaatcagcgagttgtatagttgcgtatgtaaatgtctggttgtaaaaacatgcgtgtgtaataaattgatgaacgtagacatgacatgtttttatatgtaaattcaccagtgtatgtaaatgtactgtagagaatgagttagtgtatgcagatgtatggtgcgtgcaaaaggaatgttagtatagctgtattatgtgtggaaatggttggtgtgggaagaatacatatataaataagttggtggatgtaagtgtgctgtgtgtataaattcactgatacatagaaatgagatgagtgtgtaaacgtatgtaagtcagctgatacctgtaaatgtattgcgtttgtaaatgaatcatgtatgtaagcaaattggtatgtgactatattgcatatgtaaataatctgatatgtaaatgttccatgtatgtaaatgagcacatatatgtgtatgtataatatacgtgtgtgtgtgtgtgtgtgtgtgtgtgtgtgtgtgtgtgtgtgtgtgtgtgtttgtgtgtattgtgtgtgtgaatggaccgctgttgatagcacactttgacgtgtgctcagctcccaggactagagtagcattagccattgtctttgctgctcaagaagtaggaagtcgcaccttcaccaacagggattcaaattccagtgatgagtcagaggtaaggtcctaggctctctcttcactgagcaaaacagcctggcccgttcgtaagaacattcccaccctggtttctgtgtgccgacgccttggcccttcaggctggctcttcactggggacaggaggactacacacaccaagtggcttccctctgtatctgcagttgctctggctgttccccaaatatgctcccctcgtccgcccacccattcactgtcaatttctgcccacactaccgtgttttcattgtgaacaagccaagatcaagttggaagcagccttgtctgcctgctgcctgtcctgacaaatggccacctctaaactgcaaaggctgcctgccactcctcagggcacccagtgaaacaccttccagttcaccctgactctaaggcatttgtgtgtatgtgtgtgtgtgtgtgtgtgtgtgtgtgtgtgtgtgtgtgtgtgtgtgcttctcccagaggggtggaagccacccacttacagagtctacactggctgctgacacccaggtgtcccctggggctagtagggtacagccaccacgcaacagcccttaggagctgcgccttagaaagcagcggggagtccaaactcctttcttcaggtacatgggagtctctagagcattatggatgggctgctgtaggctggtcaccagagtccaagggaaacactgcagggatgggtactgatggctgatgacagccaggaccctagggaaggctgccctcagaaaatagggtgcagctgatagcaagtgtgacaacctgtcacatagctacagtcaggccccagagggtggaggctgatggcctgacaggcctatactcatatgtttttagaaacttgcagggtccctgagaaccccacagagtgaaagagatgtttccacttaaagtttgagtttcctgtctgcttttgtaacatagttaggaacagagagccctaagattagcatccctcaaactttaagacaacccccaaacagaatggcagaattaaaatgaagcaataccacaggtgaggtattactcacaggagaagttgttggtggcaatgtctatgtatggcttagcaagcgtctctcctctcctaacagcctttaaatatgggacctatatatgtctggggcaaatgggtttccatccaaggaggagcaatccccttgtagatagcagacgctcaatacactgagttaaataagcacccacatcttccaaggaacaaataaaagtggtgaatgttagggcccttttcacagacaactcatgagctggggtggggtttgggctcaaaagcacagcactcagaagtagggcaaagaggaggaatggcaggtggcatgggagttggtctctgtgacataagcagccttttgcaggccaacagacactggggagacagatgagggttgttgaggtgcaaagggctgcttgtctgtgtgtagcatctgatgctgcattaagtgttgtgggatatttgtacactgtgaaaatgtattgctgggattgatataataaaaaggcaaatggccaatagctaggcaggagagataggcgggatttctggggagaaagagtctagacgccagagagatgccatcaaagagtggaacgaagtcagacacacaaaataggagagaggtaaaagccacacagcagaacatagattaataaaaatgtgggttaataattttagttataagagctagtggagcaagcttaagctaagggtgagctttataattaatagtaagtctccttgttgttatttggggctggtggcacaaaggaaaatataattacaattaagacttcctatctgaactaaaatgctgaaaataccaactgaagggaaatagcccagcccaagaacaaatcaaagcctttgtgactccttgtaacaaaaccagaatttgataggaagaacagaattccttcaaatttaagttcagcactatgagcagacgcagaggaagcacacagagacttcctgtgagtacaacattctagaagagtggctccatgtccatcgacaggcgtggaaactctgcctctggcagagcatttgagagtctgcccagaaatatacactcaccaaactttatctcttatcatcactttccaagcctggggagaggtgtcggatgagtgacacttggtacagagagtctctcctatgccagtgcaaataaatgtctttctcaagcattacgaagctcgttaagtaaacagggacacagaagtgacttctagggaatgttcagagaagaaaggcaggacaatgatcacatggtgactccatgtactgccgccattaggggtcaagtctgaatgagcaaatgtttgttcagccccttccatgtattgggagagaccaggggacacagtgcagccagcaacagtcccagaattcaaagagctctcagcctcaaggggaaagagggcaactcaaggtagtaaaagaaatgctgttaaagtttagcatggagtattatgggattgcaagagaccacagggacttgtgggaaacttctttaggtcaagggagggggtgacatccaagctaggacatgagtttgatccccagcaacattgtaaaaagctagccatggaagcacaaacttgtcatcttagcgctggagaggcagaggaaccctaaggctcactggccagccagtctagtggaatggatgagctccaggccaatgagagtccttgtctcagaaaccagggtggacagttcctgagaaagcatgattgccctctgacctccacacacacatgcacacaggtgtgtcccacacaagcacaaatgcagacagtagttgcttagtgagcactgactcgggaaatgacagggttcaggatgggtctcacctgggttcgaggcacagtgaagtgacacctgtttaaggctttcattcctgatgtttttgaatgcttcctgcaaatggcctatctggaatgactccgctgcagggtaggatatctcagaactcctcagttgttggaggacaacggacaggagcaaagaatggtgttgcaacatgtaaagaggcacagacaggagacagagcccaaattcaggtgctcctggcctgccactgccagtggccctccagtcactcacaggactagacaggttttctgtggcttaaaactaagaagaattctaactaatatcatccctcctcccatccccagactcatctctgccacctagcaggacatgctctattcaagacaactttaaggactcatctctcccttggagacatcctctattaacaaaccaaacccaagaaagactggaaaacactggaatttcaaaaggcacagagtttcccccacagtagtcaaagaagaagggagcatgcacaggagctgcagagatgaagggctgtttccaagagtagcagcaggctacgatctgaccttgaacaaagcccctcatgcttcacccctccacaaaataccactttctcctgatatcatctcagaggagttaggccttaagcaagggatgtttgtatgcgctttaaagctcccggatgaacaaaactgtttgcatgttgctgtactgctgtgactccctcacacaaactaactgctggacactgtgcaggcggcatatggaagtgttaaagacagaatgaagtcacaccttcctgactgctgcatgactggctgtcaccacaatgtgacgagcagctgcaggaatactatgctgtcctcggtaaaaaggaacacaggagaaaacacgccaggaagccaattaccctgcataaattctagtcttttctgccaagataaggcagagtagtgataacaataataggtatttttagtttgagttgtctacctaaagcatgatacttaaaatcattagaatagcaatgtctggactctgtaaggaagcaggaaaattaatttatctgagtgtccctgaaagtaacttgacacttagaaaataagcaatacaaaactgtgagtgagtgaattgatgatggatggacagacggactgataggtagacggatgatggttgaatgatggatggatgatggttggagcatgaataaaggatggactgaggatgggttacgtaggcaaaagcagaggaaatgatcgcatataactactatgctctatatttaattttggaagttctatctgcctattttagtttgttttctgttgctataaaatatccctggctgggaactttataaagaaaatgaactttgtttcatttaaggcttagaggtataggatgatggcatcaacactgccttgagttgggggactcctggctataccacaacatggcaggtgtattctgggagcctataagccagagagatttgaggtccatgcttcctttttaataaaaaattataaccaacttaaaagagactaaatgaagttccaagagaactttattaatctgttcctgaagtgacagccccaatgacctcattatctgtcattaggccctctcttaaccagtccatcagctctcaacatggcaagacagagaacaaagtttctagcatgtgaacctttagggaacagactacatccagaacatagcactgccacgcatatggctaacaggcagctagtgtacagataatcattctcagggacaggggagaaatatcaatcagccaagaccccagatggtaaagagctgtgaacaagaatccctggaaaggtatgactacaaaggctcatggacagatcagaactttggtgagacagagatgtcaaatgttgcaagtctagagccaaattacctcggtgcatcttcagtccccttcgtggccatttattgccctcctttgtatgtggcctgacatctctgtgaccgttaggtaaattctttggaatatctttggtttccatcgaccaaaaagctgaggacaacatcaggcatcatctgaggcccatagctgagatctccctgctcccctgtgatccacctaccttatgtactcaccaaagcactggaaaattcttgattcatgattttctttgttctgttactatgcaaacttcatggaattgttaccatgtcagaatgcagtatctggggaaccttaaattatatttcctgaccagagtcactcttaattgcctccagaataaaccatcacttttgttcctttgagctgagagctgtttgtgtcaatatagcctaaaaagtcactggaaatgaaccataccctggcagtgtaagacaaacaaaacatggtggtggtacatggaagaaaagaggagggcagtcagtgagatatatgagatgatggagaaaatggacccctgttcatgtctgctgaggcatgttggctgagacccaaaggccctgtgattcatgatggggagaaatgtgagccgaggatagactgaggacaggcctgacagccctagaaccaccgccgccccagagtgtttccatagactatgtttaagtttgagttaaaaataacctcaataggctcatgtattttgaatatctggtccccagttagcggcatcatttgggaaatctacaggacctttaggagacggtggcttgatgaaggaagcaggtcactgggggtgggctttgagggttcagaatctggttccacttcctggtctctctgattctgtctctgtctgcccccacctcccccacttcctgactgccaagccagccccacactcttgctctgtgtctttggtgccacgaggaactgtagtctggataagccctcttctcctctaagttgtgtttcgccaggctaagctatcgcagcaacatgaagatgactaatacatggtgctcatccaactctcacacgctcctttcaacagagattttaacttgtcgatggccactgatccagtgctctctatgcccaaatctcaatgggaagaaacgacccttcaccaatgcaagttccccggtggaacttcgtccactggtacctgtctgctatcagtgcaaactcctctgtctgctgagttaaagtcaccactgggtctcagtcttctcctcacccacagccagctttagcagctatgctgaggtaggggtgtgtgtgtgtgtgtgtgtgtgtgtgtgtgttcacaaagtaggtgaaaggtccagaatgtagcgcaggtggcactgctctgggtggcggtgagctttcattgtgagcctctggtgatgagtcacatccagggggcaggagtcctcctttacagcacaatgctcccctttcacactctggacatagagagctgaagccacaaccagctctcagttacaaaatgaacattgattttaccatccctggtttccacaaagaaacaaaacaaaaagaaaaaaacccacagaaaccaagggaacaggaaagcaacttggatggatatctcggcttagcacttccaaaatactccttaatatcactgcttttgggtgctttgcctggatggcccaatacaagcgctgctcatgtttagaagtcatcattacaattgtagaacagagcttaagtctcaaagccgcaaggaaggacacacagggttaatgtggccctgagcagagatgggactttgattttagcaactacttaactatctgaagaagatgtatcttgtttttaagaatcatcccattgacttcgcatttcaaactaatgacacatttcagctccctgaagcactgggggtctgaagatatcttccactttatgcaaattagcaacaggcagcaacagcacccaccagtggcttaggcagcaagacaaacttaccactgcatgcagcgttggacttcttattccttttataaaaccttgctattcgccgggtgttggtggcgcacgcctttaatcccagcactcgggaggcagaggcaggcagatctctgtgagttcgaggccagcctgggctccagagcgagtgccaggataggctccaaagctacacagagaaaccctgtctccaaaaaaaaaaaaaaaaaagaaatcttcctatcaagctatcaatcataatgacaattattatagcaaatcacgattaagttcggccaccattgagggaaagacacaggaaaataagactctggaaatgggagattaaaacaaagctgccattgtcttaacaccagccactgcctaactgtccttagattgataaaaggtgggttttggatcaagactgataaaaagcctgtcctggctttataatccatcttgtgacgccctttggttaattgaaacagtggcatttattccagagagaaatcctcttgttatctcatgtttttattccacaagtcacagggatacaggtaacccaagaagctccaagactgttatctgcaataacaggaaaggttgctggtttttcaaaagtccacttgtaaaaatcctctctacatactcacagaggtagctgacttgaagtgaaaagtaacagcatgggggaagcagatgaagatagttttcatttgaattcaaactcggatttacagttttcattctgaagcttcacctggtgtcttctccccacagaggggtcctcaaatcgctgccccttcctgagtcttagattccttacatactatataaatggacagagccagacagatggctttatgaagattgtgaatgttaacagtgcatggtattggatggggtgtcagtcttgggcactgccacctttctgacataactcctcctgcacaactcctgcacaacgcctagagaagtgggcgtggccaggaccctgagtgttttcattgccaagtactcagcagctccccttcagggtggactccccagtgctcagcatccacccaggacttcacagcactaaagggaattatgaagtgcttttcaacacaagtttttctcccaagaagcttacaacctaccaaaagaagctgtaaaagaaagccttccttcgctggaaacacagaatctgaattccagcttgcccacactcattccttgggaaggatgaatgcctagaggtctttattcctgatacttttcagaagacccggttcttcgcctggaaagctgtgaggaaagtgaggtgaatctgaagcacacaatgtccatgaagaaaccggctgaagcgttccctttcccttcatgcatcagggaagctccagaaggaaagctggggcagaaaacagcacactgagctcctcctcctcaatagccttgagcttttctcacccagaatgcattgtgaaaatatctgaggccagaaaataaggtacacacacgcacacgcacacgcacatgcacacacacacacgcacacacacaccccatatattatacatgactctcataccagaattcaatggaaaggtactgcctacctcttatagtccacctgataaagaagatgacagaaaatgacacccacataaccccaccagcagaattagacacagcacatcattgaggaagaatacaaatcactccacacttactttgcaaatgtctttattctttcctctctagcggcctttaacggagagcattatcctaagaggtctccccccatttgcaagaatgaagaacactgggatgtaagagtagcatggctactctagagaaaagagtctatgacttaggtcttagatgctccctgaaagtgagttcctgggctctgggctcctaccagggctcagcgacaccacacctgtgcagccctgaggttggcacatcatggagctgggtggaagccggaatccatgtgagaaaaaaaatcctgcaaaggttaaagagtcacagcaacttttccacatctccttcctctggggatgggttggagaaagggtcaaactcatagaggcagagagaatttggagaaaaaaaaaaacctccccaaccaatcataactatgtgtattcagctgcagcaaccaaaatcaacttaacatggaaaagcataattgcaattagggagtgaaggccacatgggtttatttcccggaagagctaacaatttaatttacaaagctatcaggagagccagagtgatgaatctgcattatttatgcagtcaggcctacctcgacagtacaccaaaaataggagcaatatcacttttcctgtcattcgtactgaagatggagcagtgacggcgagtgactgctgggagccagaatcttccagcctatctgaattttttatttcacatatacttgaaatgaattttaaagacgggctcaaatcttccctcttctccctgataaaagctttaggatgggggaagggcagacatggtaaagaggaatgggataatttgcatgtgtttaaatgacctggactttcttgggcgggaagacaggagatttttctccttgatatgacctgaaatcgcttcccgaagctgcgcttgccatttttccttgttaaataaatgagtaatagctacattagcacctttgagaaagtcttactttaatttaaataactcttattgctatcttctcattgtaaccagaagatcaactgggaagggatcgtttcttctatagagtgtcacaaaggtttagtcgttgaaggacttctgccttgaagatgtcaataaatgcacaaaggaccagagttctaacaaacacactcatggtggcagttcttccttttcgatgacattagtttacacacaaaacaaagaaaagcttagagttgaaactaaacagagagaacagaagacctggtgacataagctcgctcgctctctctttctctctttctctctttctctttctctctgtctctctgtctctctgtctgtctgtctgtctctctctctctctctctctctctctctgtctgtgtgtgtgtgtgtgtgtgtgtgtgtgtgtgtgtgtgtgtgtgtgtgtgtgtgtatgctatcaggggacagggtgagctgtcactgggcttgatggtgaagaacagagtatgggttccagcctttgttgccctaggaatctcatagttccacatctccaccaaattgccagtgtttgggtggcactgctcagagaggaaggctctcagtaaggcaggccctgcaggatgacagccaagtggctctgagtagcagtgaacattcacccttaatgaacgccatacagcctaactccgaccaaactagactaggtggccacaggaagacacgggcatggaggctggggctgctcactactcctcgtcatagtgtctaccttgagatgggcattaccttcctttcccatgccccacctccatcagtggccatagtgtggaacccagaagacaggaagtctctacagccactagctgagtgaatccagcagggtagccccgcccccatctgtaccaagtgttttccacaattccccctcatgtgtgcttcatccagtttcttcataatcctttcaaaccctgtataatttcttcccttgcttttggaattcactacaggaagtttccaatattcgcaaaacgtattgagggatggggacacgctgggcgttaacagtagactgtcactttttggagacattcctgggggttgtgaaggaaaagaaacctcatcttcccctcatgcccttcagtcagtcacctggaaagggaagagtcacctaaactccaggtgactgtcaccaatcaaaaatgatagtggccattgctgtccttgcctttaaatgtgtctgcagagccagaaaacccaagaattatacagataatagacttttctctggaaccttgcgaccccagataaagagctctgacattactacactgtgacccactaacaaatgaaccttaaacatgcctgctaattaactgtacaaacagatttcacagagagtgtttgctgacttaggagagaagaaaccattttcaaacagattacaagtatcatttacgtataagccaaatcaatgagatataaatggaggctaagctgctttgatccactaatcacttgtatctgaccattaagaatgtatttacaaagcctgttaatggtagttagttcttcgtacatttcgtcatgttaaaccagtaattctgacttcctgtgagtcagggtccctcatattggcttgaatcactgctagttcattgattacttggaagaaggcacaaggtgttaagtgctataaggatgggcactcatttctgcccatcactgaagcacctgacacacagtaggtgcacaggaaacacttgctatctgccacgaactattctgagagctgaagattctcatatgatatcccagaggcccaaggttgaggcttagaacatgatgaggttttaggcaatccagccaagttcatctacttaaaaaatataagtagcatcaattatttatgctgtatattaaactcaactgaatttctttgagatattaagatgtaaagggtatctgggaagagggcctcgctgtgattttaacatagaaaatatattcctacaactacctctcagaggacatagttcccgccaactgtcactttttccctatcacaggtccccagggctcagtacaagaggagggagggctcagctgctttgtggccactgatcaggcagaagccacaccatctctcttgtgactcacaggctgatacccatgacatttccatggcaaactcagatctttggttgcgtttctgaattgcaaatgagtgagacagataatgcatttaataccaaatgctaatgcacaatttgctagccatactaccaggggcgaatgtagatgctacatcccatgagatccagattatccccctgctcttgaacacttatactgttttgctgcaagtgcttggtcactgctggctgcaagaattttcttcactgttttggtccctgaccttagtgccctgtcacctggatcttggaattccagggagtactttagggatgtagacaacgggtacagggggacttagacagaagacccaggccctcctaaagaaacataaacttttgtcaggccaaagtaagagatgaaggcagcatgcctggtaggttctactgtacattatcttagatagggccacaaagaaatgcatgattgcccggtaggttctaccgtacattatcttagatagggccacaaaggaatgtatgattaccctggatgaccaagcgtctggcacctttcctaagagatgccatgtaaagttcatagtcaagaagagtggactgttaattagaagcaagagcaagagggtggaggcagtggctctcaccttgcccccatggcatatctctgacattccagtcccaacatgttaacaaaataaatgtccttgcacacttaaacatgtctgtgataggtcgccttacactgtgtgcatttaccacaaataaagaaggaacaccctgaagtcacttagacccacagctcttaatagctcatctcatagccaccatgtctccagggtgcctgccatggtcctctctcagggattttcaccctcattcacccaatctggaagagattttttgttccattctgctttctctgctggcctccacatagtgtgaggatggagaagctaccatagactattgcctaaggtctgtctttacctttgaacctggaaaatctctcaggtgacacttacctgctgagaaacaacgatggagaattccagactcgaggctttctattacactgaccattgctctagctaacctaattttaaaatcaattcactctgaagaagagcatcatgaagtaagggcttcccagggggatggtggtgctgggagtgtacaatagaaagaagagaaacagaaagtagagaatggaggagattgggtacggaatgcagggtcatttttatagggaccatggtcatctggaggccacaaatcgggacacaaccaaatgttggtaccaagaggacaagaattagtaaaaatcacagtctacacagcttggctctactttcttcagtatgaccagctactttctgaaacaaaacccaaggccaaagtcaagtgccacattctgtgtgtgtctgtactctgacaaaaaaatgaatagaatcactgtatctctccaactgcatgcttttgtaagtcccagcttatttccctgctgaagattaagctgtaaattacttcacccagacgtttatcttggggaagaaagagtaaagagttgacatttagaaataaagttatcatatatgtggcctggcagtatcttgtaacagacttcccttacgtctttctaagtccttgtgacaactccaaattgcatttcttggctggaaagtcaggttgaaatacctcccagaactcacactggtggcctggttcagaggcagaagtcacttctctgaaggggagaaagacacagaagagacgtggggaaactaaggagtgtcttcatctttatcttgtttccctgcggctctgcttctggctgtcatgtctctctgtttttgaaatgaccatggtcctgttcgacaatgcaaagccattttccttcctgcccaagtcaaatcaggtccacaactcaatgtacgatgcaatttgtgtggccgaagacagtctatggatggcagaaatggatggaccttgcagatctgtgtcactgccccacgtaaagttccattgaaacatcagacacgggaggagaaggacaccagtgagagctaaccataccaatgtacagaagtaaaagttatcctgagcttctttgctgtttatttccagacttttctatgattgttttcagtcagggattgaccctgggtgaataaaattgacaaaagtgtaaacagctacctccaaaccaacttcactgtgtcttttcatctctgatacctcctcatcttagcaaacacagttgctctcttctttcccaaccttcccagaaccctaagcacacaacggacggcagaggcagcatctggcacctaccttgcccatgccaggagtgtccttcaccttgttgacagccctgaggaggcagggtggggctgggggaggtgaggtctgcaggatcccactgaagctagtggcgaagaggggagcctctgccgcagatgcagtcgaaggccggtgcttcttcttcttggacgacagatttaacttctgggcagctctgcatggggacaaaaaggaggaggtgatggtgatgctacgatcagaagctctgggatggctacttctccccttctcttaaagatcccccttaattatcccttctgtcttcattctcagttccctgtatccctttgctacagcacagggaacttaattaataagctatgtgatcatcgagacaggagaaaggcgctgtaaaatcacatggctctatgatcgcaagttacaaagattcgtttgttctccacaacactccgtctgagcatgaatgaagccggccatctttggaggacatgcagcacctatttctattaaccgccacccccccaatttctctggcataaacccaactgtgaagaaccacatgagctcattgaaaaactcttacaccctgtaaaatccaagccagtctgatgaagaacctggtagtgagcaatcggcatgccctggctgtgcaagcaaaatccaaccataaagcgtactggtgtgagatccagctagccagaatatccaccacagtgaggtgcagggcacaagactaccgtcccctcagctggataatgggcagtctttaagtacaaaatgctatttatgggcaagtacgaggaaggcagggatcaaggtaacaaagcggcatagaagggtacagatgaagacaagtaggagggtgtggttgccaggatcattaataacactggctgttcacaccccatcttccatcatcagagtgcactgtgacacttaggacatgataatcctgtgatagaaaagacataaggcaaacagtggtgtgagacaaaggcgtgtcacacagcctattagacaagtttctaaattaattcttggtgtattgcaccatatcttgctatataaataggtacatatgtggttttgacgggggcaggaggtatagactcactatatagcccttgctgacctttaattccctctctctctctgtctctctgtctctctgtctctctgtctctctctctctgtctctctctctctctctccccgtgtgtgtgtgtgtgtgtgtgtgtgtatgtgtgtgtgtgtgtgtgtgtgtgtgtgtgtgctggcggggcactgagaggtggtacttattcccttatattaagggttctttgcagagtggagaaaagactgaccaaggctgtggccaccactggggcagggctggcaccaaggaacagcttagacgaggctgtgtctctgccatgtgtacccatctcatgtgacccacaggttagagaaacaggcttccttgtaactctctgctagatccatccatacagcacacaagcactctgctctttgtctcttggaaaaatacagcccatttgacacttccacagctagctgtggtgctgtcctcactcatttgagccaaactcccagcaaatgccacctgtcaacctctcatccaagccccctcctcccattctctgcaagctcgtttcagttaggcatctgtctccaaccctccgaaactgcttccaatagttaccaatgcctgcatgatgcctgtcgtggtctcagcccccacctagagcggtcagagccaacaacacttgtatccttcctccttaccccataagctttcaggacaccctattctcttccagtgttcttttcacaggggacgctgggcttggtccctacttctgtgtgcaatcactggtgttggcttcggagatcacatcctcagcctgtgactccttgagtgttctgtccagcttagctcctgagctcactatttgtttatccgaaggcctctccagcatccccacttgagcgttcaataaacatcactaacttgccatccctaagactaaagggattattgccttctgcacagctcttacgcactcactccaccctgtctcagaataagacagccctgctcttcaggcacctagaccttgacccacacaacacacctaatccccctcagattttatcgctataacttcaactagacccagtttagtttctcactgcctcagactctcatacttcccatctggctcaccacatactcctccctttgattgttaaacattcaaatcaggccacccataccagtctccaaacactcccaatacatccccacctccccttcctagccctgctcccagggagacaagcatgtggctcactctcctgcctcctttaaatcttggttggaatgtcactttatccacacacttagcctgtccaccatagaagtctgtagagatggttctgtcaacatgttcttacaacctggcacttacactgcactgttgagaggtggggtctgtgttcctcttctgggatcctgataggaaatttaaagttgctttggtccacagaatgtaatggaagagctgttgtatgactttcaaggttgagttaccaaaggtaacatgtttttttttttttttttttttttttttttttttttttttttttttgtaaaagctacatggaagctcaggtcacatgtatggactccagaggacagactcatgagtaagttgtccttcagatgattcctgtcacgttttctggcagggtctcagataccaaggagcagacagaaacctcacctgtcacatcttgtctgaatttccagcccccagaaaccacaaaagctaacaaaggatcattgtcactttgagccactaggctaggggtgacacctggtagcggccataggacaggaattgctcagtctctgttgcatggctctttcctcgggattgaagcctttctcttgtagggagacaagctcacaaagctcggggaactccgaggactcaggtcaggagacccatccctgagttatctaaggcagcacacagctgctggagagaagacttcatgatgctatctgcaaatcctatcggagatcccaggcatgcagctttcagaatcatcacccacactcaggagggctttgccgtgacacagctcctgtgagtaacatctcatcacggtcctgtgagtgaccctcatcatactcctgtgagtgatcctgataataaactcattggttcctcaagatggatttgggtcgattgtttctctgacttgttattcccccatctatggaggtgaataaaaatagatgccccaggaaaagtacacacaacaccccccctaaaaagtcccaattcctgttactttgatcattcccagacaagactctgaccttctaatgaagcacatggcttacttagctatcttgtttatgagctgttcactttaaaaccccaacagggcaaagaagcacaaagatgtttgttaaaagactagatgagtgaaataaatggggttcccctggggagaaaaaactgaagaaagggaaatgtaggaccctctaaaattaattaattagtgacaaaggaaacaaccttatttcctgcaaaaagagcagtgggcactgcagaaacaaaaggaccactctaaaagacctaaagagaaataaatggcaaacagaagaaagtgtctatcaggcaagcatgttaaatattttgattggcaacttttctgactcctagaggaagagattataaggaagacattaccccacttaacacaaaatgaagtaagtcccagaggccctttggtacctaacgtgagtttgaataaacagcttcttcagatgctgtgctggttaatattcctgtcaccttgaccagaactagatagtcacctaggagacaggtctctaggatgcctgtgagggattatctggcttaggtaattggggcaggaagacccatcataaacatgggtggcatcatcccatgggctgggattctgaactgaataaaaagacggtgtgctgatgcccggcattcatctgcttcctgattgcagatgcaatgtgaccagctgtctcgtgttcctggtatcatgactgccctgtcatgatggacctgccacaccctccatatccctgtcaggatggacatgtcatatcctccaaatcccctgtcaggatggacctgtcataccctccatatccctgtcatgatggacctgccacaccctccatatccctgtcaggatggacatgtcatatcctccaaatcccctgtcaggatggacctgtcataccctccatatccctgtcaggatggacatgtcacaccctccatatccctgtcatgatggacctgtcacaccctccatacctcctgtcaggatggacctgtcacatcctgcatatcctctgtcaggatggacatgtcacatcctccatatcccctgtcaggatggacatgtcacatcctccacatcccctgtcaggatggacatgtcacatcctccatatcccctgtcaggatgacatgccacaccctccatatcccctgtcaggatgggcatgtcacaccctccatatccctgtcagggtagacatgtcacaccctccatatctctgtcaggatggacatgtcacaccctccatattccctgtcaggatggacatgtcacaccctccatatctctgtcaggatggacatgtcacacccttcatatcccctgtcaggatggacatgccacaccctccatatctctgtcaggatggacatgtcacaccctccatattccctgtcaggatggacatgtcacaccctccatatctctgtcaggatggacatgtcacaccctccatatccctgtcaggatggacatccatatcctccataaattactttggtcagggtgttttgtcaggacaatgagaaaaatgactaatacagatactaagtaggtaatcacagacaagttgctaaaattctgactatgtgttcacatagtatctgccacattatcgtcatcatcatcactttgactgttaccaagacttggtttttctacagttaagaaccagaaaaaatactatcagtgttaacaggctcttttaggataataaaaagagtgttataaagagtttagtgtaccaaagaatggtacttcagtgagatacataataagactgactctagatggaggaacctggcattgaaccattttacctttaaatagagattagattttgtgaccaaatctaccagtgcaaaagactaggtaaaacataaaagcatattggctttataatagaagggaatttttctaaaagtaagagagcccattcttgataagtcagcttcatgattttgtcactgaaagtgtctgagtggtgggtagaaaccacttaaggggacgatcagggaggaaaacacgaagtgaggagtcaggtgatcttctgtgtcttgcagcatggagactgaaggtatagactcctggaactccagtccacttaggaaagccctactgactcccactaacaaaaactggatttgattagagggaattgttttgagactaatttttaagttgtttcctttgtaaaacgtgcatatagctcatatcaggaaaatttcagaaatgtgaaatgaataggatctcccttatagccacggattccacaatggcactttaattctgacattataaccagctctctgctctgtcgtatatattccaattctgtggaggccagctgcttcagctctctttatatagtgcttcaatgacacagataggagaaggttaaagtttagaaaccactcacgtataatggcattatgcagggacataaaaggagaggtggtcacaaaagaattgaaaggttgacattctggtgagatgtgcattttgcaaaatccatgccctacaaattcttcccccctacccccacatcagagaaaacaggtgagttgtttttaacaaattttcaaatagcagattaacctaaaaggccatgttttcctgaagtgtcccaatgaaggacagcatgacgtatttcctggaggtattcatccagcgcacctctttaactatctgttaacttcatggacttcccagtgcttatttcaaggaaaaagatcgtctccctagcaggatggaattaagatttactgagtctgtgtctagaaagtggcaccatgctaagcaccatcactgagatggtggagagggtggaggatgcacacagggcgtggttctcccctctgggctccccatccttcctcaccagctctttactctccgaccatatcaatgtgggtttaggaatcagcttagaactgaagtcaccttcatggggtggttttctattctcagtggccaggccactcagacttaagagctgaaaaatggtatcaatacttacctagtttcaataggaaggcgttttatgcctcagctgtcagtcaaagtggaagcttaaggaggattttttttctcatttgtttgtacgataggctatttattagattgcggtgctggattttcagaagtgtagagcaattaaatggaaatcaacagtgcatctcaagatagttaagtgggagcctgcaacccttgatacccatggactgctacaatatagactatcatctctgaagaattactagcttcctaaagagtacaactttccttaaagattggtcagaaaactcaggcgatacagtctcttttttaaaattagaaactttcctttgttatttaatttattaatttttattttcccgtgtagcatacagatacgagataccattgcggcattttttttcaaaccaggtgggttttagaagattctctcccatctccctcccactctcctttcacaaaattatttttaaggacctttaccctttttatgattctgcccagaacatgttgctaagcatgccccgaaaatatctcatcttatctgaggggcgttcgagggtgggatgctcagaaaggtgaagaaagtgtttctacaaattaagaggtcattcaaggtctactcagcccaattcagacaatgcatgggtgggagagcaactgaaaaatgacacagccacacctgctgcccagacggggccctgacctaggagagggactgtgtcagttgaatctcctccatcagtgtgtgaaggacaacccaagctacaatgtaatgcgaaaatggctgatgccgctggggctcctgcgccgtcatagaaatatttcagtgctccgaggattaagactctctgataatgagcaatgacatgacagatcaccggagttctcaggaaatccacgggggtcaatgatacagggagagaagacaataaaacagattataaatagcaagaagaggtagcaagagcttgtggtttgaggcagaccctctggagacatttaagatacccatccaggtgtaacaaacaccagtgatgcctcatcttgaaataacacccatttcaaagcatcctgactctgctgtgaaatataccatagtcattttggaatttccacaaccaggaacaaaagcacctccccaccatgccccatcaacttcctatttcctaactggctgtcaggaagggcatttctatgtctccagagtctgagaaaagaaaagaaaacatgtgtgtcttggagttgttctgatttttattcaaatgatccattcattagtaaggagcataattcatgacatgacttcagataaaatatttactgctaggaggcaaagcagggctgaccattactctccaacaatatcaccctaaaacactacggggagtgtgttataacttgaaaatgggtcctatatcagcccgtggtgagaacggttgtgcatttgttcttctcttacaaatggaccccacccacctcttcagccttgtttaagtgacattttaaagcaatgcatcttaaaaagggagatcacggttcaattctaaagcagaggcccctttgcagtgtgctcttctgctttggtgtggtctccctcacctcactgtgggctcactgaagatggacaccaagtgttcaccttcttttctggcccccagacctgcctgacagctttgtatcctgctgaagggatggcatagagacacactgaagttctttagatttctcctctctctctctctctctctctctctctctctctctctctctgtgtgtgtgtgtgtgtgtgtgtgtgtgtgtgtgtgtgtgttcattcctacagagtggagaagagcgtgttggaactcctggagctggagttaaggggattgtgacccatgtaacactggcactgtgaaccgaattctcaggaagagcagtgagtattcttaaccactgagccacctctccagcccccacactgttcttaatcaatccaacctttggagttacagcaacacatgaaagtctcaagtagccaggagttctaagtagtgctgaaaccaggaggttttatggttttccaaagcattgttctttatgtcaccacatccatcaggtcagatggatgtggtgatcatagaaggtatttgtattgaaaattatgaagtgttagcagttatctgatttaactgctggtcccagaagtagtggttgtcatgcctgggactaatacttaagtacctattgtcagagtattaaatcatggcaacaagcaatgaaacggatgtaagccctttctgctcagaagcccccaccccgacatttgcagaccttctgttcctacctgcacagacccaaacatgcttagtaccaaggaaactgggtgtcctcttaccctctcctgtgtcatacctctgcaaacctggctcaacacacaaatgagaaccccacacaccagacctaagtaactggaaatgcaagttatagatcccacccaatgccagatggaaatggttttagttaataaacgttactgctgtcttctcttaaaaaaaaaaaagaataaaagaaaattggctggtcttatttaatggaaccaatgaaaccatgcaaggtggtttgaataggagtggccccgacaggctcatttgaatgcttggtctttagggagtggcgctacttgggagggattaggaggagtgactttgttgaagtaggtggggccttgttggaggaagtgtgtcactggggatggtggccttgggatttcaaaagctcaagccaggctcagtgtctctctcttactgctgcctgcagatccagatgtagagctctcagctaccatgtctgcctgtgtgcagccatgctccctaccaggaggaaaatggactgataatggactaaacctctgaaactgtaagccagcccccaattaaacactttctttgataagagtggcatagagggtctcttcataagagtggtcatggtgtctcttcacagcaatagaatattgacttagataccatgtctctataatactgttatttagattgcctatgaattataggcagagaaagacagtcttatgtgaggaatagatgatccttggagaacacagtgcctgacttttctgctgagaaagagttggctgtaaaagatatatctatctcagtatgaggacctcccaacggaaattaaaattccttcaaggaataagcatattccagataatctgatttcaaggttctgatgagtttaatgctcttttcattacattgggctaaatcacttatctgtatgctaatgcaaagttaaaaggaagatgttcaatgatccaccagaaacaggccacccaccttcaagccaagggcagccatttcttccttggccatgttgctcactcctaaagtcttcattataaaagtaatagagcgtcatgctcattcctctgtattctgattatgtgaaatttaaaactgacatggagttacacactttggatataatgtgttgcctgaagctgcaaactgctgtcaaggcatgagaactagaaatgggcagagttggcagggaaagcaaagcataatctataactctttgctcaatacctgtagttttttcagagcaaaactaattaattgtcaatgccaggtgacatgctatctggtttgagggtttcttggttaattaaatttgaatataagttgcatttgctaaaggaagcaattttcttccctgcaatatttttattttcaaaattatttatgatagttgaaatctgaggaaattgttaactaaggtgtttgaaataaaaacagtctgaatggggtctccacaaggcaaccatatggaacacaactagaagtgggtcagactctcagcctggtctctgctgcaaggctgaactgccctagattcctggcagttgttatggatttttggtccttcatcagtgtcactggaatctaagaggctgaaacttacattgcccttcttatgattaggttataaaatatccccacatttataagtgtccccccaaaagactcatgtgttagaggctgtgacttgagctggtgctgatatctcggtaggctctaggaggtggacatagctagaagaagtaggtgtgtggtagttagcccttgagggtaccttgattctgatcccccctacacacacacacacacacacacacacacacacacacacacacactcacacagagacacactcacacacacacactcacactcacacagagacacactcacacacacacacacacactcacactcacacagagacacactcacacagagacacactcacacacacacacacactcacactcacacacacacactcacacacacacattccctcctccatgaagttctgcctcactctaatccagaaacacaaagccaggtgaccatagactcaatcctctgaaaccctgagccacaatgaatctttcttcttttagagttttctcttgtgtattcggttcagagcatcgagggagctaccaccctgcctaccccagtctagccactgcaaagcaagttgggatggcgttcacacagatggctaaaaactacagcagatacactgtgcaacaacatgtatgtatcagatacgttcagagctctggactggggcaatgaagcagctctgtctggttttactaagggctgacactgtctccacggagcaggtggcacaggttagattgttgtagaaaccagtaaaatcaggctgtaaaggagaagagtctgcggtgaccatggctcaaccaggcagactacaggggcaatgctttctgcacgtttgtgtcaaagctgccacgaagacctataatctgctttttgtcacatacactcacttatttgatcatctcaatggggactgaggaagtgaggtctgggtacccgtctccatcggtgggaagtaggatgagcactaaacacagccccttccctcgcccatcagtctctctacccctgcatctcatgttgttgtggtcatgccccagcacacacgcatgtggcagatgggcaacgagggggagtgcagacaagaaataaagaacttaaaaatgagacaaagcagcggagtcctctctggtatttatttcattggtctcaactaattttcatgttctttcatatgactcctttatcatataaaatagttactcaggaagtattcttgaaaaggattatcaaatgattaaatgaagctgtaaagaaaggaaaccacttgaaaataaactgtgagacgtagtgaaatcaatcaaaataaaagaaggttcattgaaaatttcctagtaaaccccgtaaagtgacccagactaccgaatacttaactgggtttttttttttttaaatctttgtagacatcttatgtatggataggtgaaatgtacaaaaagcagagtcaattatttttctgtggacattcttagttactagattcccaagttgaataattcccttgtattctgcagaatttggagcataactatactattttatttttatttttatctgtgtggtgtgcatatgcttgtgtgtacaggcctgtcaagtcctgaggtcaacattgggcatagtccctagacttctcttccccgttgtctcttgaaacagggtcatctgacgagactggccagagagagagcttcaggggcccatctgtctctgcctctgtccactccacaaatgctggggttacaagagcatgacacacccctgcatggctttttatgtgggtcctgtgggtctaattcagttcctcatgcttgcatgacaggcactttactgactgaatcatcccccaaccctaattatgctgttttaagtagccatatagatttttaaagtagtatttcaactttaccaccatgttagctattcctgtaattttccaacactgagtgttttgctaagaataaatcacattgatgtcctgatgaaccatctaggaagattgtcaaaaacagaacacgtagaacatgcctgttctgatgtaaagatgacagatgtcgacagatgtgtgtaatctctgaacaggacctggcactgagaaacacccaggagatatttgtcattgatgttgttacaacaaaaagttgatatgaaggctatatcttaagtgtgttttaggagattcttctgcagaagctcctaaatgcatgagttgtaagtagagtgtcagaaaagggcccctggctttgatccctgtgctagtcgggggtttctattgctgcagtgaaacaccataactgaagcaagtttgggaggaaagggtttacttagcttatacttccacatcataccctattaaccaaggaaatcaggacaggaactcacacagggcaggaacctggaggcaggaactgatgcagaggccatgaaggagtgctgcttactggcttactaccttactggcttgttcagcatgttatcttataaaatccaggaccaccaggccctgcagggatggccccacccacagtggtctgggccctcccctaccgatcactaattaagaaaatggtctatagcagtggtcctcaaccttcttaatgctgcaacctgttcatccagtttctcctgttgtgataacctccaaccttgaagttattttcgtggctacttcataactgtaatcttgctactattataaattgtaatataaatatttttggagatacaggtttgtcaagggagacatgacccacagattgagacccactgctcaacaggcttgcctacagccccattttatggaggtcttttcttaattggggtgttccctcctctcagatgacactagccaatacaatccctttgtctcccagtcagctcttagtttaccagcaataaggactatgacattgatgcatgcccatctgggttcctggtcatcttgaatttgagtttggttaccctgatggctgggaagaccagaaaagaggacttttatatttgaactggtaaactgtggtcacctacagcttaaatcagatgtcaattagatttctactcaaaccattgtttcactctgaaaaccagatgatgaaatcaaccatgtgtccctagcgttggatactggaggagatcacttactttatcgagtttcttctctcacagtgtatcctcagacaagaaccatcagagaaaagaaaactgactgtcagcttcaacctaatgtaagccgtgtcttgggggcacttataaagaattatgcaaaatcaatgcatacaaaagtcaaagcctatgttaagtaaattaacacagctgcttgagctgttaggcaactgagctgaagttgaatgtggcccgtatcacttcccataatgcactggagataagttgtccatactggtcatgaaggctggtaaactacgactagcatgcctctcatattacagtcactataagaaaggagacacaaggagaggtacacaccacttcccacaattggctgcagttctatgtatcatcctcacaggacagaaagttctacaaggccacaagccagctctcattctatagttgtgttctccaacttgcctagcacacaatgcataccacacatatgtgaatgaatgatgaatgcatatgtgaacgagtgcctgaacagttgggaggataaacagagttggctcaagccattgacattccagaagacacgaatctgactgcaattcttcttgacagggtcaaccttagagagagtttggaaacacgggtgtaggtggagtgatttttacccaagaattgcattggtgcagaggccctgcggggctgctttgggatgcacttttacaggattccaaacaagcctgtcaggatacactaacaggaacttcactctatgtagggaagatgattatttgtactgggtagggagatacgattctgtttccttgtttttaatgtggccctttaaaacagagagtgctcaagttgtccgggatccctgtttttccatctctctatccacatattcaccaatgctgtggtgctcaaaggaagaagcaggtagccagtgctgatgctcttgtagtctggtccaatggaacttctgccagggtaaggactttgtggtgcccaaaagtgtggacctactacagctattctgctaaatggatggagcttgaaacttgcttatgaaattcctttctctccacccacacaacagtcagtctctcagacctcatcagagtttatttgtgagccaatggtggttaccagggaaactcaaaactggtcaaagcacagagaataagtaccagagtggagtgctcagacattgtctagatagacgtccgtccaatactccctccccaaggctcaggagccaatgaagagggagtggaaagactggaagagtcagacggatgagggtggaactgaagatgtgtcttcaggacgggacagggcagctgtcctggtgaactagcagcagctgtgattgctgcacaagttcaagccagccaggacagagggggagaggagccacaatcctcaaccataactgaggagctatggacaaatgacagcttctgggagaaggggaatccatattctttaagggtgtggtttctggtaggccagccgcagtggagtgtgcatataaaggtatatatggacagctcaaatttgagttgatgggttatcaaaacccaagacaaaacaaaacaaaacccacaaaactggggattagggaggcaagagcatactgggaggatttaggggtaaatatgataaaaatatgaaattctcaaatgactagtgaaaataagttttaaggaatggtgcatggtacccagtagatactaaacaaacatttaaagaagaaatgaagaaatgagtttttcgtttgtttctaacgtttgcaggctcctcggtgatgattatacataaactgctgtgtaatacgttattttctaggctatcacatttggagaattaatgcaacaattgtgttcattataattaattttatgcatcattattaatctgtgtccaacatgtgttttgccaggcctttgggagcgaggctttctttttaagttgtctgttgacacaaatatgccgctaggctctctgtgaatcagaagctatggatttgtgctttgtaaagttgattctaaaagtcaatttgattagatgattgttttttttccatttctgacctttagaaaggaaatcacttgctgccagactagcaggagaggactgattcccttctccagggggatctccaagtttgcgtttccttggcttcttcctgggatagttttcagagcagaactgcacccacaaaatcaaccacatctcaatatatatactttatttttattaaaacatagactcttccctaagaaaattacattacattttttttgtacatgttgttgcaacagagttttactaagttcagcctcacctggtgcaccccatcctctggccagtgtctcctgagttacgggattacagatgtgtatggctattctgggattactgatgtgcattgctatgcttggattacaagtgtgcatgcttggattacaagtgtgcatcactatactgggattataggcatgttctgctatgctaggattgcaggaatgcatcactacactgggattaaagggttgtatcactatgctggcattgcagacctgcattgctatgttgggattccaggcatgcaccatcttgctgggattacaggtgtgtgccactatgctaggattacaggtgttcattcctatgctggggttacaggcatgcatcaccatgtctgtttctcaaaactgtatttgtaaagaaattaaacacatggtgttcttgcatttgaacgtgttcttgttagactatcaagtaatgacaacaattgaattccaatcctactcatctaaagataaggagtatgctaaataccaatttttaccattttccccactgaatgctgaaaacttgtaaaacaaaacaagtatgaatgttctaaattaatacagttaagttctctagcacaagacagcattgccaattttacttggaaataactttccatagtttgaaggctaaaagctctttcatcacattgctaggcaacttccagttgtttttttaaagctccttgttcttattctttacagacactgtttatacacacatcctttaagctcctggaaaataaagaaagatcattattcaagtatgttcctgtgggtggcaagggctttatgaccatttttgaatgagtgaatgaatgcacgaggcctggagagaggtcagtcaataaagtgcttgccatacgagcatcgagttcaaatcccagaacctatgcaaagaactgagtgtagtcgcacacacttgtcatctcagcaaggttgagatgggagccagctggtctggcctatttaggaaattcaaggccagggaaatctgtgtaactttagagctctcttggaactcaccttgtagaccaggctggacttgatctcacagagatctgtttgcttctgcctcccaagtgcatacacacacacacacacacacacatgcatgaagggattcaagaacatacagaagtgtgatcttttactatagttcccttcccccagaattctgctctttagagttgaaacatcagccaaacacatgcactctaaggattctcccaggcttgagaagccacttctctgcagacatcacgatgctcaactcactatcaaatatccaagtcattatcccacactacaggtgcttcagaaggcttgtcaggatctctcccaccccaccccccgttatggctttcaagtgtagattaataacttagccagttaacagaatgcaggcagagagagtgcttaggacaactgtgaaaagacaggatgacccccaggctgctgtgaaatctacagtctcccggatacaacttcaggctttttcaagtgggaacaggttggctgaactcattttcctcttctctctgagatgcatctttctcacccacacccttttttttcaagaaatgatttttagaaatagctatactctcttcagatatattagtatattcagatacattagcataatcgatttgcttacaattgaaaatgacttccctctgtcagtcgtaaaactaaggttataaacacaaggccaagtcgtcagttcttctgcctccctctttatggactcatgatgtactgtttccaatcagctgtaaggatgcaatgtgattttgagttttattttttatatgtgataatttggatcttctatgtttcccaaaggccatgtgtgaaaggcttggataggtgatgtaacctttaggtgaagaagactattaaaggaagtgaaattattggcggtgtgctctaaagggggtatcagggatcctggtccccttttctccctctctttgtttcatggccaccaagaagtgggtctctctctctctctctctctctctctctctctctctctctctctgtgtgtgtgtgtgtgtgtgtgtgtttgtgtttgtgtgtgttgtactctctgtgatgatgttggctcttgtcacaggtccaaaccgtaagccagaaataagcctctcttccttaagttgatttttataggagtttttgtcacagtggcagacagctgctgtggtgcaattgctatttgtcattattatgatattctgtttaatgtggtctgtcactaatcactgcctagcctgagaatctgagaaatatttagtcctaatcatcatgagatatgcatatagtcgaacagtgccatccactttcatgctaatgtgggtaaacagaaactcacggtaattccactgtaaattcccagccacaccctctgcctcatccttccagaccctctgcccaaagagaattcattctctacttctgtgggtcctgagagtgttctgctaaaactatacctcaatggcgagaagtactttgtgtcttactgccgtagcagaatcagctggtgtcttagttgcttttctcctaaaaaatgcctataatgtgttaggtgctcagttagtgtccttacactccacatctgcttcccagcctgaatctgatccataggcctgggttttaatatcaaatgattgactggatttgtattaagatcctgacagctttaatcacaatgcgactgaaatgaaaatttctatagatttagttgctgctgccaaaagctaaacctggctactttttttttcctgcctctgtccagactcacccccaacccttttccaagggccacaaagttaatttttggcacacactaatccaatactgagaaagagcccacagaaaacaccaggtaaggtaaaggctgaagcagagaaagtagcctgagccatcagcctggctccttccccagcccccatcctccagccgcctttctcagtatccagggactgtctggcagggaacttctgcgttcagccgaagagaatatacaaatgacagtttgggcgattgagcttattacctaagcagagaccttacatatttatgaactgacatcttggatttgtggctttatgggattcttccatgtccctttcgaacaccaataagctaagcagagaaaggccttgcaggtttgtggcttcactccacacctccatgctggcactcagatatggcaggtggctcatttgtggagacatccagggtcaaaagaaagtgaaaaacgagcctctccagtctgctggtctaaacttgatccacagagcactggccctactggcaaaagcagctgtcaggggcctgcctgtagacagatatgagcatctgcatgcctgctgagcggcccactaacaaagcatctgcatgtacacagacagggctccatggcgcccctggaccatcttgaggctctatatcagggctagccacaggaaccatccattccgatcaaacatggttttgattttgttttgtcttgaaagaaaatttccttcaggaaaatatagggttttttgggggggttcatcacaaacctgagttcttacagtgttgcagaaaaccacaagccattctacagaaaaaatgggtggctcctgctttggcccccgaggctgggctagagagagagtggagaatcaggtgtcactctccttagttgtgtacagtcccgtacagaaataaataccagcaggagaagtgagagagatcccaaacctcaggaaagactcaaggctggaatccagacccatgtttgtcagacccaaaaatctttgttcctctattggctacaatcctgcatgccgaggattctgtgaagtaagcaaggaatactttcatgtgtatgtatgtattatgttctacttggatgtatgcctgtgtgtcacgtgcaagcccggtacttgcagaagtcagaaaaggacacagggttccttgaaactggagtcacagatgtttgtgggcctcggtgtaggtgctgggaatcaaactctgatcctctggtaaagaagtcagtactcttaaccactgagccatctcttcatctcctcgccctcatttttttatctaggaacagtcctctcagggcagcccctagagttgttctcctatacttaggtaagactaagtgacaggaggctcctcctaggcatactggctttcaagttttacctgtcactttgaaatgaaagttgtattgcttcctgagacccaaacacattgcttcattttctgttcactcagatcctatcgttgaggcaaagcaaggcctcttcagccatttctcctttccattacacagccaggcagcaaacaggaccctagtctagatgtaaaatgcaaagttcaaggggtggatgcggccaccatctacatggcgatgtgtgagacgaagagacttgtaccaagcactgcagatggactatatcgaaccaggcttagggggttaaaggaattaggcagattggaggtagggggatgctgtgcagaggacagcaataaaggtcagtggaggcaggtaacagaggagtcccttaggaagaagcagactcggggccacaaggcttttgttgttggtttgcttaatcatcacaccagcaattactaacagagctgagactaaatgtccaggcttgaccaccgctccagtagtcttctcttctcattgccaacacactgacttccccaggcctcctgtcatgtaagatcttgggcctttattgaaagtgtcagacagacgagccatcactcacagaaacactgccagaaagacacaacacggcacggagctggccccactcattcttttcctttaattcttccaaagtctaatgagatactgtactttggatctggaatgcccctcagaggctggcttctcagcatggtacaattcagagtggccttgaagggaacatgggactctggtctccttttcttcttcactttcagaccatgaggtgaaggaactttctctaccacacattcctcgccatgatgtgatgtgaccctttgctttaagcccaaagtaatgaggtcaatagctcgcaggcctgtgagcccaagtgagtcctgtctctttacaacttgatcatctcgggtatttgttacagtattggaaagctagcacgtgcaataagattcacacacgtttcactgatgtggaaattaggtgcttcagagatgctaagcaatttacagattagtagctcaagtggaggcaggtaagtatcagttacacggtttagctgttacctaaccgaagctctcccactgacttctagtgggaatgtccggcctgcgaccttgggctgcatgtggccgaggatagcacaaatcacagacctgcctaaaacagtatgtttttgcgatttatttttgtgactttattgcacatttcctgagtgtgatccttatagatgacaacattgtgttgtgatgtcaaaaggttgggcctgtctccgagggagaaaatatccaggaaaaatggatttttttctctgatcagtggaacttccacacccattttccacaagtcaaatttcctcatcttcttcttttaaagattttatcttacgagtgctctgtctacatatacaccagcatgcccgatgagggcatcagatgctacaatagatggttgtgagccactatgtggttgctgggaattgcatgacctctgtaagaacagtcagtgctcttaaccactaagccatctctgcagcaccaaatttcctcatcttacaagtctaacgataagaatttttaagataacaaatgcatatgtgtgctcgtgtacaacataatttaaggtgtgtacacagtgaggaatgtctaaattgagctgactgacatatgcattgcctcacacacactattagcaattttaaatgtgattattctccaaatctatcaaagatatatttcttgcctgcctgccatctctctgagggactaggttggaaggtaaggttgagaaaagatgtattctctgactaaattggctctgctggcagacacaccaggaactcagaactctctgcagtgcaggtaggagaaaagtgaaacagatcttgtgggcaggagtacaggaggctgcaagaatgaggaggaccagttgggacaaaggtgcccagagggcaagaatagtgaaagaaacaaggggggtgatcttcagggatgaaactcccagaccttcttcacagaatggaagcaggtgctgggcagacaaagtactcaaacagcaaagtgagagagcaggcagagttggttttgagcaaagctttcagacgctagttcgagctctgtccgatctatgagtttctgctaagtgtgagacttcaaccacctggccagtagaccttcttggctctttacaggactttacttgaagctcctcaggaacacccagatctttctctctcaccttgattctgctttttgttgtttttggttttgattttttttaattgctcagccgttttcctgacaccttgcaaagactgaaggtatcagcatatctggtcattttctttttcctcattcaccgctccaccctccattgaaaccctgtccttggctgtttttctttctcccttaataagacagagcagagcgggtccagggggacttgaggccttttcaccaggtacacttcggagacaccaagaggcatgggggcggatgtgggggcagggatatatgctcagttaaaattagcagatgtgtggaagatcactcctcatggtctttctgtttctggagaaaccaccttcctttgccccaaatccaaaagtgttagaaaataatcccctttcagtcatcaggatggttgcaattgatacctgccttaacgggggaccaaaaagaagcacggccggtgacatgagtgtggtaagaaaattctttcaactctgactttgattatttaatgtttaatggtgttccctttccctgcaagccttgctccaggttcttccccacccctccaaacctcttccagatgcgtgagtctgccagagttcatataaaccagaaacccaaacaaaacagctccagagttcaaagcttttccctttgcaatacaaccacttcgtgtgccgaggccctcacgtgacaccgccaacatgtgttttctgtctcagcctcccccttgataacaaaggacatattttagaaggtgtggttctaggtatatttggctggcaagaatctcagtgcagtctggggattccgtttggctttaggctgattcccctcagggccttggaaactcttgataaggttaagggccaattaataaagttagcaccgctttgggtcaggtctgatgtcattctgctgctcacagagctgacttaatactcaggaatccactgagctcatttagtcacccattggcccacagatgcgttgctttacagtactccctctgtccagggctgggaagggcgtgttcacagggcatctagagaaggggctttcatgatggtccaagatttggagggaagaatgggagtgggagacaggcagggaaggcaggcggtgggaggggcctgagctctgcctggggttgagatccagaaaagtagagaaactcatgacagcactgctagaaaaccttttccagatccaagctgcttcaagcagccaggaatagttagtgctactagaaagatgttacggggaaagttacaactgtctgtgagaccaaaaaaaatcctcaatgaaagacatccatacctaagtgatttatgatggtgaaagtctccagtaaaatactatttgttaatctagaaagcataaacggctcttcctctacacaatgaaccttgttttagacccaaaagcaaatcatatttttaacttttagctcctgatctttcagatggcattctttcttcctgtgacatcaaactgatttgggtcttcatgctgcttagtaactgaggcacttgaatcaaattctagcacatacagaaagatgaaagacctctcaagacactgccagttctcaccttgccactgtcctgtgtgctagagcagggaggggtctgtctcaggcaaagctggagcacatggagattcagtcaactctgaacattagttaaaaaaaaatcaatctcacatctgtgtagctagaaagaatctgttctgaaagccacaagctaacttcattttcaccattctgcaatgagaacacatttcaattccatctttgattctaaaaggggtcaatgtcaaatatttttacaatccagagtaagtccccttatagcgatggctaccagataaaagtcctgattcacttacttcccattttattcttatccttgggagaacgtttgcagactctgtgccaacagtttgtgtgtctgcaatagggctgtatgcattcagaatgtcaattacataaggaggaaacgcaggtgaactggacctcctaacttcttagccatacttttacacatttgcgtttcactcttctcaaaggaaaattcactgagaaagcattaaaaacaaaacaaaaagcacagcagacagagcgtgtaactagaggaacacacataactgcgttactcacactgctctccagtccatcatcactgataaagcgtggctaaagaaccaagcgccggatccatctctccacatctgctaataaatagcttctctcaagtgtctcctgcagatctggggccatctcaggaggaaggaagagtgtgcagaggtgaagaagaggctgggaaattctaaaatccatgggggtctgggaactttggcagcagcccttgctgcagcattcctgtgattccagcctgtggctaagccaagatcctggcctctctgagctcccagccaccttcctggtgcaggtcagtccctgctccaacattgcattgccctcccagaacgctgcatggatgggatgcaagaggagctggctgaaatgctgccagtccctgcaagcaagctcactcttttcccagagctacaccagcctctctgtctgctgctatctcagagagccagcaagggaggggcagaggcaggcaggcaagcaggcaggctggcgggcagggaggggctgagggagaatggggggggagaagagagacaggagagaggaggaggaggagggagaaagggaagggagggggagggagggagggagagagagagagaaagagagagagagagagagagagagagagagagagagagagagagagagagaggagccttactgaaagaccagaagaaaaacacttgcaactctcattaacccatgtagatcaggaattttctgatcgtggcagctgaaaaacagaccatcaaaaccaagtctttaaaaatcttcaattacatattgagtacatgttgagtcatgcatgtgcagacaaagactacaggaccaaggttctatgcatgtgtgtgacactccttgagagaacatttgtagacacagagatgtaggtccctaggggaggaagagctacaggcacagatttcattagctgagcagaggtgtctaaggctcacagtgtacctgtcttaaaactgttcagatgatggtggtaacagaagtgcatacaggggagaacaaccccctgcctcagacactgtcttggactgtgctttcccagctgggttggtggggcgggggggggggagggcactccccagaaatagttttcaaaagaaggcacagaggccaagcaaaggttacagtgagatgctcagctttacatgctgctcttcactgagtgggcgtggctactcagggtatgccacacaccccggcaaggcccatggcccacaggaaagaatggtcctaaccaggtacttgagacagggtaggggtacctcagtcaggagtgctgtagggagagaggctggactggggtggggggagggggagttagaggaatgtcgtggtggtccagcatagggatcatggaagctaagtttctcagggatctttgtaactgtcccttacattacaagatactcccttcctgtgtttccatgcgtccacatagtaccggccttaggggcccctcgtggcaatatattaggactctgaatccctggaccctctcccccaaattctgaatagctttgagagactataagctgcactttaacaagctccgagagtggtcaggctagagtcactgatcggtgaacggataaatgaaacacgaaatggggagggcatctaagaggcttcgatggcaatacggacatttagaaaggtgcaggcaccaagcctgagcaggaaggggaaagagcagggggagagggccgggagaagaacagcaagggcgcagatggagtgactgaagcactgacttgacgggtggaccatgagagacagcctgtcccttctgtgctatagtgtggactgtgagtgtcctccaaggcacatgccttcagggcttggctcctggcttggttctattgggaggtggtagaagcttcaggtgggatccaggaggaggttttggtcttgagggtgtaccctcaagaggaattgtgagactcacgaggtgcactggcctcttccgtcatgctgtcccaccatgatatattctaatgccataggaggaggttttggtattgagggtataccctcaagagggattgtgagactcacgaggtgcactggcctcttccgtcatgctgtccaaccatgatatattctaatgccataggccatggagccacctggtcacagcccaccacctcccacagcgaggagccaactcaaacacttcctctttttaagttaactgatttcaggcatttgttacagtaatgaaaactaactaaactgactggaatgctcttgcccccccccccagcaaatcactgagtttaagtcacattctctggcaccttcccaaccatcccagaggtaactgttttaatctcttcctgtttgtatctctcattgtgaatgactttctgcactgcagttactttcaggccgatagatttcatgcctagtcaatgatggtgaactatttatgtagaacagatgatttgtcaattatcaatacatgtcccaaattctaattctagatacagtagaccctgaacattaatttggatggtgcaacgtaagatcatatcttcacttgagcagttggcatgtggaggagtggctctgtaatgagtctttgttttgttttgttttttcgagacagggtttctctgtggctttggaggctgtcctggaactagctcttgtagaccaggctggtcttgaactcacagagatgcgcctgtctctgcctcccgagtgctgggactaaaggtgtgcaccaccaacgcccggctgttatgagtttttaaattgagtatctagcaacatttcatgtattactttgcacacatgatacctttcacggtaaagaaaacgttttgagtaaatcagaatgtctgggatttgggagggttatgacttagtggaaaatgaggtgtaaaagttgcaaaaagttcatctttgcaagaggttaataaaataaaaaacaagaaaattactagaacgaggtgaagttggcagaaaatacagaactgccaaaaggccttttgatggactggtatatggcagcccaaggacctacgatgacgaagcaatggtgtaactctgcctgaagtaaaggggactctgaataagtctttggaaaatgtctgccaaaatcattagcagaaaacaaaatctcccgttttcttggtttaatgagatgggaggactcacccattaaaagttaggaaacacactaatataataactgagtgaatgactatatggagtggtgaaaagagagagatttcatgcgctattttatagtttctaaagggttccattggtaccaagtcctcctgggtacaacagatgggctgtggtccaggagagtcaaagtgcttgttcatggtcctccagtaagtgacaggatatggagcccagttttcctcacacaatctgccacattgtctactggaccaaatttagaccttaaatatgaaattggccattaagcttggtgaaatggaaggaattggacgattctgatagaattccatctggaagcacattgttctacttgtcaaaacaatgagtaagcaacgcctcagtagcactggaaatctctacatcccatctctagaaggatggagtgtccaccagcactctctactctcttgtgggtgtagcagtgtaccttcttggtctttctttaagggggtctttctttaacttgttgccctattgttggacagtcagcctccctctctgagccctttcaagatttgcctcagctgaggaaagctacagaaagctgtggagaactggcaccctcgagcgtccttgcccagtgaccaatggtgatgacagtagaagggtcatcaggtaatccagtacagacactgcactgggccatgcaagctcaggagagtccctgtagggttgaacaagcttagcagagcctgcttggcagcctgactttccctctgttcaatcatcctgagtgctcatctccaacagtcacccccacctcatgcacgatctctctcacacagacacacacacaactccatttgtgtattggcttcctgagggctccacctgccacatcccaggtggcctgctctgttcaagactcattaccagcaatttccagtccccacacacatacttctggtgatatcaaagtgtcaaagccatggaaatggattcttcctccttcatcaaaatgttggaccactgtttttatctccatgtgtctctctcatctagtggaaatcagaggccacagaaccctggggccttccagaggtggaagagattcagggttcgttcctcctgcccacatggtcccctttctttaaaaggagagttactcttatttatttttatgttgaaaatcttgtaagattttatttgaaatgagcactattgtttttgttgttttacagcattggtttgggtggcctcatagccacctccacctgtgacatccttgggggatctcattgtccacagaagacaccagaaaggtaggaaaaacaacatggttcttaaggccatatgctaattttgaaaaaatggatcaatgcacatataaagataaaatcataatatggattaaagaagaggtgcctctcgggctagcttctagttcactggacagagtgggaactactgatgatggtggaattgaggaccatttcctggaggagctgagacaaattattagttcacggggttatcaggaggatctaagatgggtagccttagaagaaacagctttcagacaaatggagcaaatccttcgactgaaatcttctgatctctcatcccctctatctccagcacacggtaatatgtatgagcaaggcagaaccattgacaaggacaggacgggtttccttgttcctctgtataaggtgatattctgagtaatggctaaaaggagcacactggcttctggaactctagggcacattttatgtagaatatatgtattcatacacaaggaagagggcctaacagttaccaaatagtcataaatgatgaaaagcctctaaaataatcttatctaaaatacttatacaatttccctgttggaagtactaagagtatagaaagccttaatcatttaaaaacatcaaccaaaatgaatcatgtgtagtctgtaaagacatcagagatgtctttaggatattggcagatgtacataatatcatatatgtaatttcttcacattttcaaaacttctgttgtccattaatacagatctgaagtggactaatgaggaaactataccccagtcaccatgtgcagttggcaggctttacagatgcttactgcaggcttgcatcccttccttccttccttccttccttccttccttccttccttccctccttccttccttccttccttccttccttccttttttccttcctcaacattgtgtgctgttgtgaaataattaccatccaaggttcagtcattgtgtagtttatctttcagaaggaaatcaagagtttgttcactttaaatttgacagtttctatcatagtctttgtgccccattttctaagcctcattatgaaatggctccaggcctgaataccactacaggtttacctgaaaggggaaagggaagaaaatgaggggaagaaggcccagaatggagccgtctgtgcctagagatggaaggagcatggatgggcataaaactacccccattcaaacacagcccaggccctgccctctcctctggctgcagccctgacttcctgtccctgcccttgcttcatctacttgcaagctttctgagatctggggaggtgatgtttgtcaagtggcccctagggatctgagaatatgactagagcagagtgggtctcttctccttggcaaggcccagccttggcccctgagcacagaatacaaccttctacagacagccttgggtgatgctgcccacagaggtctagacaagtctagcaggagagctggggtcacacagagggacaggcctggcagaaaaaaaaatgggtcatatgatatcaaatcccataagacagcctgattggccttggaagagccaaaagatcctcacaagagacacatattcaaacagtcacaaggcaagacggtccccctgcagacagacctgaatgaaatgtcaagttctagagcaaagtcattggttttcaatgtccccaccaccacccagtttcctttcatggacagtgatcatccttcagaggcaggctaggatgcccttgatctccactctggcaggcttaagagagggttttcatctctcaaaagaactgaggaattctctctctacagcacatttgagaacagacttcttttgttgaaaataatcaggacatcaaacacttctttaaaaaaaaaaaacctaaaaggtcaaaacttctaatatttagttagatctctatggggaaaggaagtgctttcaagaacataaatgctaaatttgggacatgttaatatcttagaaactcactcagtatgcagggtggcttgatgacacacagggagtctccagactctggcccttcaaataactctgagagtttcattcctattctgtatggacaaatatatatggagcctgtatgttagatgtgtacatgagaaaacctgatgcatgaacatctagatggtatttccaaaagacaagctagaagctatacatgtaattaataaaaaaaaagagtctataagcatttctttccattaatatcaatagtttcccatggtgatatctcaaggcaatagggaactggaactcactgatgttctttaatccttatttgagacatcctcttcacatctggttaatatctatttatagctatcatcaattttaaatctccagttggaagacttgataaaaccatgctaaactgactattctgagaatgtggtcataaaacagtagacagagcttctctctcatcagaaagacagagtcttgtctgtccacctatatgataggtctggtgtttgatgcctctaaagtgcatgttgtcctggttggtttatatggtaactttatatggttcacggccaacttcccagaggatgatatagctgtgcagctggtgtcctgtgactgtacagcagtgtgctcagtaccaaaatatcagaacagcacgggtgcatgatgaagcaattgcctggatcaaaagacagaagcatctcggagccagatttagcaaaaggctcaacaatcctccgtctgtgtgttgataatggactagaatcacttctaactgccaaatgtctctaaatatgtggccagtcttagcaaaaatgcaattgtttatgcttcgggtcacacagactcgtttttgtgtgaattctcactactagcctgaatggcaagtatcctccacttaaaaggtgatctgtggatcaaacctatttccgggatacctgtgctctcatgacaccatgctaaagcaggcatctgatctccttatatgtgtaagcaaagaacataaagaaatttaaccccattgcttctaggatatcagacaacagaaaacaaagaactccctccccaccatcaagctaagctaggttcaaagctcatacttgaccgaaaacaaataactaccacaagaacataaatagtttttacgatatgtaggcccggctccaggggctgcacatagaaccatttagttcatctgaatttcagctttatgatgtatatagcactgtttttctttttgtaaaaataagtaaacagggatgaaaatatattaagagctttcctccaggtcacataagtggcaaagccaagacttagtctagttcccagggtcccaaacattgcaccagacgtaatcactccagagtgtctcatttaaactatagtatctatctttgtctctgaaaggggaaaatggtggtaccaatctcataaagttgtcaggatgcctagaagagcatttgacagtgcctgaagcatcacggtgcctcgtaatgtctcgactgtgttataactattcctccgcagcatcctgcctctttgggactaatctatgcatcccctgtgaagatctacaaactgtgttgcatggcctgcctgcctttctggtccctgacatttggtttactgaatcctaggctagatagaatgatgcctctttgcttgtcaaggagggggcaacattttatacaactctagcatgctgttcatttactaggaaacagacctcctgaaggaagtaaaatttcacctttatcctcactctgactcttaactgtggcatggcacacaattcatcacatttgtattcagcatcttgacatctgacgcccctgcccggcactacagaattcctcttctaattcagaggttgtgttttacactggctgggatccagcccttgctccagtacagtctgaggactacaagaggtgccgtgtcttggactttcttctgagagtttggaaggaactctatgttaggatttgacaactttttggcaagaattgaagcagtgcttgccagtttgccctaggcactgagcatggtaatgcgtattacaccaggtgctactcatatgttacttaaaacaaacccagtttttagcctatcacttgggttatacagtgtctccagttttgcactttgcaagagtgctgtataattttttaactggggaaacttggaatgtgtagtgaagaactcagtcctgcaaagcaaccttgggatcgggatatgggctaaatgatcaaattgactgcttccaaccaaagtagaactcttaatgctgcacaatgggacaggtgtcattcccacagcccagacaatcaggctcacaggaatgaggtcagtgtcctagcagatgctcttcttgtgtagttctccaaagggaagcccagcaactttcatccataagactacaaactgaaaggaatatcttttgcctgctccacatactctggaatggatgtctaggtcactggaaactcctgatgttcctagcaaaagttggatctatctgtatttcagttgatagcaagaactactcagcctcacatataaggggtgtgtgtgtgtgtgtgtgtgcgtgcgtgcgtgcgtgcgtgcgtgcctatgggtgtgcttacaaaggattgtatgtggtggttagagaacagcttgcaagagatagttcttttcttccactatgtaggtccagggaatcaaacacagttcctcagttttggcagtaggcatctttacccactgagccttgtcaccagcctccaaggaaagcatctggagtgtacagggtagaggagaaggaaaacatacgtagggaagcaatgactctgcctcctccatgccttagccaaatccaaaaagacacattctccacgttaaaaagcaaccttgcatcttcctgctcatttacgttgcaactttgtatctctaaggctttagctcctgccagccacagatctaccaactagagaccacaagcaaacaaaacaagtcctgggttcagttgtaccgcccctgcccagacaaggcaaatctgaatgccctgtatgctgataagctgtatccaataagaatgggatttcaaaagtagcattgctgctttgcttcctgaccccttgtgttattcctaagtgaaaacagaaaatccggaagtggagactgtttggcttcatacacgcatttctatttatgagttagggattgtcccactaggaatttaaccaaatttatctgacttgggaaaatcaaatcagataataatacatacttttctgcccatagaatacagtaacacaagctgtatctgaagtagtgatgcttaagctgggtcacttctgcattgcaactgagtgtgggacaatttagcaaccgtaaagcatttctgaacatgaaatgactaaaacttaacttgagatatcatacgagtaatgaatccaaggtgtctcgtcatgctcagtgtgttacaccaggtgactgcactgcagccttggttctgagctcatagcatgcttgcttcatggtacgtgtgccgtgtcattcatgccagtaagtctcaagttcagttcagggccgaggcatcacgttaggaatgaccttccttcctatacagatgagtcctctgctcttctgggaacataagttgagttacaggaaaccaagggtgctttcctatattcctatactccacagggtatgtgtgaaatcgtggtttcatgtcttcaggttggactgtgttagaatataaggtttaaaaatgctggctgaattttggcatggaattaggacagaatgtccaacaacctttgaagtcatcctaaatgcacctctgccattctgtactgtgcatttatataaaacattgttcacagggttgatgattataaaatcaaagcatcaaccaacctgaaaagcactgactctgtatcttgcagcatcaaatactcagtcaagatttaacctttgatgaaaaaataaataagtgcactcatctcattggtgtgtaaatttttttcaatttagtaaaggttatctataatgtgtatcaaatatttaaaaatatttatgaattattgtacagtatgcatatggtttgcttacctgttttatatatctgtatgttaggggttatgtaagacggtgttgggcaaaatgtcatgaatggagcaatgtaagaggccctgttttagctcacctgttgccttcactaagtcataaagtatatctgggccttcatatttaacctctccatactcaagagggtttggatcaaccctggcgatatttgtatagtgtgattctctctgaagaagagcccatcacatgtgtacacatatgcacacaccgacattactctagtgctcttgcagtttcactacgggtcacttctggggacactgagaatcatcccccagcttggatcctccacacatcttttttagcaagagtaacataaaccattgatgacattaaaataaaagagatttgaaattacaactggtacaagaagcattcaaagctcttttgggcaacctgtattctcatgactgcaattaagtctggttttcttaaaggacacctgctaacaagctacttcccttccaacccacacaagtgcaacttggcatgcatgcttcatcagtccttcacatcctttactacgggacacaaaatgaggaacaccagtcagtaacattggaaggtaactgagagaagggagtggagagcagactcgctctcttctccccagaccatttcagattttgcaccatggaaaaagggaaccaggaggcagtgggttgagactagcctttctcagaggcagcttataaaggcagctagtaaattattgaaagtcccaggctaaaagaaagtgaaatattaatgactgtattattgtaaggaagaaaacctgaaagtccatggagatttaaaccatctttgcaaaaagaaagctcaatatacaggaccaagtcccatcacaaataactcagagcaattgtcccagtgcacgcacgcacgcacacgcacatacacacgcacacgcacacgcacacgcacacgcacacgcacatgagtgtttaggttggtttttctcctgtctcttgttttgtccagctttgctgtgagtaagcagactctggtctggtccactaactattttgttcaacatattattccttaactctgcgcttttcaaggaagctttctactagtagactaaatgataatattccactagcttctaattaagcatggggagctaataactttgacaacaagggctaaccccatcattcaggttaccgagaggtctctgattccattttcagggtctctgatagcgctgaagtaaacttgcttgaacatactagaatttaatcatcatgctaagcaaaagaagtcaaactcagaaaataagcattgcaggttttctttcacatgaagaatatataatgcatatattacatacgtatctgtgtgttcttttacatcacatgtatgtgatacacacatagaggaaggaggtgtctcaaagcagtgaagggggaacaagaatgagaaatggagtaagaaaggcaaattattatatgtgtcgtcaggaggaatctaaatttaaatatgcatatatattcataaatatgacataaaaccagaatggggactagcagggggaggaaagatgagagaggggagtgggtaaaaagatgagcatgagcaaagtatagcatgcacacgcacatatatgaaaacatcacaatgaatcctaccactttgtatgttaactcaaacttggtaaaaaaaaaaaaaaagcatttattagaatataaagtgtggcagacaagctcctaccccctccctatctgtgtgcccagggagacttccatcaaggaaagagatctacttggaaatgaagagatacggtttatgggtaataatggtttgggaatgttgaaatttctgcaaattacatatgcagtcacattattttttgagatgtgaataatatgacagaatgacccttttaaaaatagctttcacctaagtcctgctttttatttagcagttgaaaatcacacctgaaacaacacattattgtaattaccttcattcttgttccaccattggcaactgaaaactcggtccttacacatacacaatgtatggccatggactaggtgttaattcacactagaggagtagttagttaacatgagaggtgccttgatcaagtgcataaaccaggcatgattggtgagttagcccttgtgtgtcaaattatcaagttcccccaatttcaaaatattatctattgggatctagtgggatgttgtctttaaaccaggggaacactgactcctaaatttctttgtggtcagaaaggattctctcaaatgcaattagccctttgacatttgttgacacttgcttgaagagccagcatatggtcagtttcaataaatgtctcaatgttcttagaaagaactacactaagtcataactgagtaaatcgctcaacaccaggtctctaaaactctcccactcttggttcctttccaccaaagaaactgttatgtaaccccaggagtgtaagatacggctacaatcaaacattgtctgtcaataagtcacaacaaaatttattttaaagcaattatttggtagaagtttacaatttatgtaagaaaaatcaaatttacgtactaccaggatggttgttaaggttgagtttgtttatttggggatactagttgatactgtagggtgtagagcatactgaatgtttttaggagttcataaatgctttgattttatagttgtcaatgataaggacaccacctcacataaatgtgtaatacagaatgacagaagtatatttagtgacatttcagaaattgctggaacgtctgtcctaattccagggcagaattcctttaatgattgtttttaataaaactcaagtcagcaactcaaacagcacattattattgttgttgttgttgttgttgttgttgttgtgtgagtgcatgcatgtgtgcacacgtgtgtgctagcaccatggaagccagaggtcaagctggggtatctttcatcaagtaccccccaccttgttctctgagacactttctgcagggaactggggactcgctaactaagctaggatgtttggccagcaagcccagaaatctgcctgtctcggccccctcatgcaccacactcagcatttccagacatgagctctggctctgtataccaggtgtgcacagagtgaaatgtatgcaccatgttaaggccaatgctgtggggaagttatgcaaatgaaatacggtcaagagtggtcagaaataccccagattctttatatgcttgattttgaattaatttttatatcattgcacactcagatatcttttgtttttgcaacccccacatttagttgttgagcccattatgcagctgaaccccatttaagaagctgtggtctaaatatcatcctggtgaaaactaacagtgtttgttatggcttgaatgtggccccttaagtacacatgttagaaacataatttccaaagcaacaacagagaggcgggtcctgcaagagcggaggtcatgaggcacctgcctttaaaggatgagtttgtctgcctcaagggcattatcttgctttgctgacttctgccacattatggcaagaagatcctggcgtggtagagtaatcagagttctccagaggaacggaagtgatagaatgaatataaatatattcaatattatatatatataatttttccttgtcctttgttagcagaaggtgtggtccagattaaaggtggctcttcccacctcaaaggatctggattagggtggctcttcccacttcaaatgatttaattaagaataatccctcacaggtgtacccagccacttgggttttagtcagttccaggtgtagtcaagttgacaaccaagaatagccatcacatgtaggccacctgaccttggacttagccactttccagtaagaaagacatctctgttccatataaattacccagtcccaggcagtctctgatggctggcacaaaatgaactaacatggtgttcaggcttgagtcatgttactagttgtatacaaatgtggacttgttatacattcctgtttactgacccttttattcttaaaatgctcttattaatctttaataatggttcttatcttgccttgcagtgatttttttcattaatagagctatagagcttattttattggatatttacagagtattttttttctgtttcttattctcaacttctcttgtgttctacaccttaaacagcaccatttatgaagagtatacaattagattttattttaaagtataagcagaaaattgtattgtaattgtggtatttagctgctttccattcagttaagttcctaatgtatttgggtttatgcctaccattttggaattgtttttagatagtctacctattttattttctcttttcccatctttgcagcttttagattaataaagtattttccattttatttcaccttccacatgtattatttctcattactctatagttcgcattatgtgtcccagaattactgcagtctagcagaattacaactttagacattgctatgattttataatactttaattccatttaattcccttctttttatatgactttggacctacatctaaatgttgcagagacatccaagagcccctgtgtttgttgttttatgtgaccaaaatttatttccactggccagtatattttctcaatattttattctgtaagtttacaacagtaatgtgaggaaaaattcaacagcaaatgtccataaacctcgtttaaatttcttagaatgttttaaacttaagtagaattttatcactcttccccctcctccgtttcatccctccagcccttcagagctgctcccctcaagcccctcccatcccccactcttaagttgatagccccttgtattgattattattgttatacccatatgtatgcacaaatatataaatacaaagtgctgagtctgttttgttgtttctatgaattggtttctattggacagccaataaaggggctgatccctggaaagggtgattctccctcttccagcagtcattaggtgcctgtagttctttgtctggagtgggactctgcaaattttcctcattccctgttaatatgcccagcgatgttggcattgttccagtcttgcttatacagccctttgtaggagagactacttcactgtagacttcctggtgttccaattcttacaatctttctgccccatcttctgggatgttccctgagtcataggtgtgcaggagctgtgatgtggatgtgttttctgttagttctgttgtctatccatccatccatctaaacagccatcaacacacattttatttccaatgtatctcagcccaacactcaccctttctgccactgaattctttctgaatgtgtgagatggcttttgcctcctgtatacatttctttaatactgcatttagggttgctctaatatcagtgtactcctgaaattgttggttacaaatgtcctgatttcactttgaacattgacaaagacttttgtcatatttgtatctccagttgtcattcttttaagcacatgcaaatgacatccccttgtctcttagagcccatcatttctgctctaagatgtaaatgattcattgtactgtttccttgacaacaatgttgttggtgttgttattgctgttgttgttgttgttttggttatttctttggcttttagcttcagaaatcttactagtcaagcctgctgtagtcttctgtgtttagatcctggctttgacaggcaggacttcctaaatgttctgatgttttgttttgtttttaccgtttttttttttttgataatattgcttctatgccattctctcctttttctcagattttggttacacgttgaatgagtatgttccatatgtcttttacgctttttgctaaattttcatcattttgctctttgcattcacatggatatattctactggtccatattccatttcactgattttatgttataatactaaatttaatatgttatggagactatctagtgagctcccattaaccaatatttcagttttttaagtttcaaaattgtcaatttgttggggggtgctgtcgtaaaagaaaaatagatgccaaatttctggtgaaattcttccatgtaccaccttgaacatgccaatgacatatacttaaaagtttatatcattcaattgagtaagttataggactttttctggtgcttatttttctatcttaggattctttcctggtatagtcactcattttgttgaaaataaaattacaaacaatacatgctattaatgggcaggctacatggaactgactgacttagcccaactcaagaatgacacagtgagtctaagaaccaactcaggtgcttggtcagcaagtgcctttatctgcaaagccaccagtagtgtaacttttaatgcaaactactatggaaatgcctagaagggtagggtatggtgcctcacagactttacaaagcaaacagtaacattttctgtgagatggtgaatacatgagtttacctgtattaacttattataatttaattctcacttccttcattataaatctacaaataaggttttataaggggaaacccatagtcctgccagcctcaaactatggaaagctaatcacagttccccagcataactgtaagtaaccacataggcacaggtcagtttgaaaaccatactttgcttcccaagtcattgcaaacctgtcctggcgacgttttctctgacttttcatgtttggttttcttctaaaaacaccatataaattgttatagcttgtccaattcttgacccacgttcccttataaacttaaatgcatgtatagaggaactgaggctactaaagacaccctcctacccctaacgccaccaaagttggcaactgacactctattcatgatacctgctctctctctctctctctctctctctctctctctctctctctctctctctctctcttccaaagcttgtgtatatcttaacacatacacacacacaaaaaaaaaatagtagagaatccaaactcttcttcaacaaaacatgtggagaacccagaaagaccactggcatgacatttctggccatttctgtatttaagaaaagagctaaccccttaaatttggagactcagacaaacagttctcaggggccgccgagatccttcatggaggtgacatcagaaagggcctgatgtagcctcacataaaccccaaactctcagacttgactggtacttagagatcttcaaagtccatatatccattttatggtgaaggaaactgatatcgtgagagattttgtgagtactagccaaagatatcaaagaggtaaggccagaatgcagccagcatcgcctcccctatcttctctccttcagtcggagctgcttacaagtcagtggctccttctccgtctgtaaggatccctcgggcttgctctcttgccctagaccaagttatgttgggctaatgacaaacgtgatgctggacacaggttggctgtgtctatttagctgtcttacagaggagcaggatgtcccaagcaaacaacatttttatagcagaacaatagaaaataataactgtcaataaagcaaaatggctttaattctaaaatatcaatatgaaaatattgatgtcaggaagacaaaggcacctatatgtcaattctgacctgaaagttttaggtcctccgtctctggttgaaactcatttcactcttttggataatcttggcagacaataaatacgccgtctcaaaagaaagaatgtacaaaattaaatctgttcagtgatttctcatgggacaaagtccaatctaagcaataaataaaataaaacaaaaccttaagtctggaagagttagaaatgtgtttagatttctataaaacacaaagaattcaaaggctctgacctacttgaaaacattctagatatttccagacaatgtttacttcctctgttttggctgatgcaaaagaaccccttcaatatcaggtagtcaatcacacagcacttaggattcatggggggaggggcagagtgctcatgcacgtgtgtgtacacagttgtgtacatgtgtgtacacagatgtggatgtgcacatgattgtggaggccagaggatagcctcagatgtcatccttcaatgcctactcaccatgcttttggagacaaggtccctcactaatttaaagctcccccattaggggagtctggctgtctatggagtcccagggatctattgtctgcaccttccccgtgctaggaagcaggcactgtcacacctggattcttgaggattgaactcaggtcctcatgcatatcaagccctttgcaacagagctatctccacagccccggcattcagattcttaacacaaaggtttacttacaacaataaatgcagcaggaaataattctcatgtattcccaaatctttttcatcatatatatcatcttctaaggaacatctgaaaggaggattgacgggtgacaggcactgcttttgataagacactaataggaagcagtttcctttttattaaccagtagcccactggcaggctagaaatacaaatatggcctagtaataaaaacaggttctactgaagcctaagtagcagaggtgtcccccgtgggaagaatgaaaataagccgatatgggactggtcagtcctatgttttcattcctccataatggatctgcttattgcatgtaccacaactaattcacaccatgatttcccaacaagttcatcactcaaatgacagtccaagatctgagtataataggcaagggagtaaggctgatttaacattctagacaacgaaacaaatagacacggagcaatatagtggtggttagagtataagcagacagaaagagactctcacagagcttaggcatttactagcaagctgatctgagcatggcgcttaactctaaaagtgcagattaaccatccaccttaaaatgtgactgcaaaaatttaatgagacaatcgggatgaggtttgtggcaggaagtaccaggcatgttacatgctattatcaacatacatatcatcacagacttgtggtacagttgaactaagccatactctgacattatgacaccttccgcccagcaagtctgccttttcctgctgacctccttagatttcacatatgaatgacccaaaaagaaaactcaactcatagtcttgctttaaaaaacaaaacaaaacaaataaatttaaaaaaagccttgcaatttatcagacactaaagcttgtagtctccgagggaggtggggctgtgtttgagctgtacggaatctgactgaccatcttcaagaaggagaagataggctcacacttgcaggctctctcaaggtcagtgcagctcattgcattgtttggcacccttaggtttttaccccaaaacttgaccaaggatcttaagactttagaaagacaatgtgagtcaagtccaagacatccaaaggcctctcctttatttgcttcatgaatccagcccgtgtttattcataattagcgtgtaactgccatttcaacaacattgctgcaactccagtttaaaggaatgcaggagaagtgggtagttgactaactggaaaaagtgctcgctgtgcaagtgtgaggacacaagttcaaatccttagacccatgcaaaagccagagacatacaatgaatgcctgtaactccagcactgctgcaggaagatgtaaggcagagacaggagaatcttcagaagctcgtggctagccagcttactgtaagcaagagaacaaccatgagactctgtctcatgcaacatagaaggtaaaggccaacatcaaaagccacacttgtgttatggcaagcacacacctgcactcacacctacaagtgtgcacacacatgcacaaaaaaaaggatacatggacacatgagtcttcctcaaactgtgttgcattaagttagtttaaaacatgaggatgccagggtttgcctgtgtgttaaaggcttggtccccagcttgatactattggaacatagtagatggagtcactggaaggcaaggtctgtaggttacagtgggtgtaccctagaagggggttgtgggattctgatctcttcatgcatgcctttagttcctggttgtgagatgaatgctttgtgctctttgccacaagcccaaaggaaataaaataactaagcactcataaactgaaacctccaaaactgtgagccaaaatcaaccttttctctttaccaattataacagtaacagaaagctaacaaagaagatatgtttcaaaggtcaaagaagacacttcataatgttcagtaagtggcctctgcctagctcctcagttcagagatcaagctagctgccagaatgtgaagtgaactgtctgtgtgccatgtctcacagtgagtgacttttaaaaggtgagagtttgctttcctgtccataggaaatgacagaatccatttgaagggatttggggtgctggagcagtgagctctgtgggccatttgcaaatagcctgacaggggagctttagctcatctgcatactgcccatcagcgggttgcagacccagccagaggcatgtcttatccctggtccctccgttattaagcacttacagaattaacctcttccagtttccctctgagcttagggtctggaatgcaaatgcaatagcacttttcagcctggcataattacaataatctccctaaagctgggttgctgctggaaatctccagtgtagcccagacctctatgcgtggttcacaaaagacatttaagaggtggaagaggctgggccacagcagagcaagaacagcactgtgggccagatctaattcagggacgggcacaggacgggagactgtccaactgtcctctcccggatgcatggctggtttatccccaaggtcatcaggtcatctgcccaggagacagactgcagggtgctgctcagactggggtgcagcaagcaccctggtcagtttccctctcttctcaccactggcacagagcatgtgaggacgctcatttgttaggccctcatgaggggcttcagaggagcttcctgtgtagccatctgctggcgaagttgttggccaaatgtcaggtgagtacaaagctttttgttcattttttcccctatgtagttgagggattctttaaaaaagaaagaattgagccaaaaaagagctgacaaagggacaaagtgagaattaggaccctcatttaaaaacaagaaactttgtgtggagtttttccactgatcttataaaatgctcaaccacatggtttcagcctgagacgacgggacaaacacacaggaaggtgctgcaaaagaagccttcaaagagacttcaacaagaaccatcgtctcttagccttgcttatgttagcctctgagaaagtatgtcagtttttatctttcaccagtgcctatagattgcttgaagctccattgggaaaggtcaggtctcgtctgaaagaagactggctgccataagtgccagaatacataagaatggcagctgtagggggaggccaccatgcagaagaatgctcctcccagacagactgactgttgatccagatgtaaagcatcactaggcggcatctgcacccttccttcatttgtccactgaagctatggagcaaatgccagccccactcacatgaacagacacagggcaccactgtgatatcttgccctgaggctctgtggtgatgggatatggctacacagggtctccaacccatctgtacagggtctccaacccatcagtgttctcctcagagtcctatgcatgtactattcatgtgataagagattgtgcacactcttgggggggtatccacctttttattttaaacttgacaagtaggctaggctgcttggccagtcagccccagggctccacctgtctctgcctccccagtgctgggactgcaagcatgcctccataccaaccatttcttacgtaggctctggggactgaattcaggtcctttgcttgcaagacacttgccaactgagaaatctccacagacctacatgaagccttttaaaaattagctttccttgcgatatatacgcaaatgtatcagtgcacataatcaggccctcggccactattttaattatctgagcccacggcattaaatgtagacacaatgttattcaacattcactactgtgaagtcccaaaccttctcactgtttcaaactcaaactctgtattcagaaagtgctaactccctattctctctgcctccggcctctggaggtcaccgttctgatgttgacctcaacagcttacctcatctgggcaaacctcatatgagtggagttgtatttgctctcttattcctgcctctattacttagcataatgtctcctgggctcagccatatgggagcagtgtaagacctttcccgcttttagtggctgaatagtatttcattatttactcacaacacattttgtgtttccatttatctattgacagctgtttggtcaggtctgtgctaatttctcagttcctattggaaaaatggacagaacgccaaagtgtctatttgtctcttatcattatacttaatgtagacaagaaaataactaccagggccctgggactcaccaggacctctcacacaaatttactctgctgaaagattctcccaagagaaaaaaataacaataagttaatggcccacggtatttaaaaacataggagactccaaactgctggaatgatttccaaatttaccatttggaacaaatcccaaattttagtctctgaatgaatgctccaaaattggattcattttcctgtaaaattttctccatcactataatttatgagtctaatattcctccagagaggaatctgttgcagggactccagagatcaccagtctctggtcaccttggaatatacccaggaacttactccggggctgcttacagggctctgaggtctgcctaacaatggttaagaggcttcgagtgactcatggttcctctaacttgacatgcaaagacctgtgtagatcccttgagtttccagaccttatcggcatttctaagataccacggatgcatattgggacacttgattagctctttctttggtgaggtaagatttagacctagagtgaacaaaaacacatccaagaatgattaacatttgagaaggaaggagaagcagaggagtcacaaatagagccaaagagaaagaagatgtgaaggagggaaaaatatctgtgcaatgaaaacagaaataaaactgggagaaaaagaaaagatcaaagccaggacctcgtgcatgctgagcgagccctcagcatggctgcaattagtgggcaccgaggcaagagcagggagctactacacacctgcaagagctaaaccataaacactgggagtgggctggggttatgaactttcagagtcccgccctcagtgacacacctccaccaatgccacacctccaccaatgccacaccaatgggggacggagtgtcccaccacccaagcccatggggccgtttctcactgaaagcaccacacgctgccccaaattagttttctggttaataacttttaaagcttatgccttcagcccacagcacctactccctccaagacaagtctaggcagatgtgctgaaatcagcacccacgagaccgaggtattcagaggcacagtaatccaggtcagaaagagaggattctggggcaggcagacctggactgcaattcctgctatttgacactggacacatctaagtggtatagttcatatcttgactggccctcaaaggtccatgtgccgatgggtgggtgcccagtttgtggcactattgggaagtgatggaagctttaaggggtgggaccttatgggaaaaatttaggtcatcagagatttgcccttgaaggggatgttgagaccccggccagtgctttctttgcttccaggctgccataccaccaaacactgcctacttgctggtcctcccacaggtctaaaagccatgagaccaaccgaccatggaccaaagcctccaaagctgtggaccaaaatgaaccttctcatctgtatacatttctttatctcatgtatttgttacagtactagaatactctgttggattatcaataagcaatttagggggggtgggtttactttgtctcatggtttgagagggtaccaggctgtcgtggtagggaaggcatagtggctaaagcagcaggctccatggaggaaggagcgtggcgctgcttgctcatatcatgggggatcaggaagcaaagagaatatgccgaaagctaaattgggctataaccagtaagacctgtcactagtgacgtatttccctcagcctgacctgccttccccaaacaacaccagctggtgaccaaatattcaaacacgtaagtcaatggaaaacattgcacactggaaccgcaacacccataacacaccaagctccgttttagtccctgtacatgagggtactgctagaacctgtgaggaccaaaggagatggttgtcttagcctttggcttgggataaaatactctatgcatgtttgatattacatattcctcccatcatgctccgttttgagatggcttctctttatcagcctcctggatttaactttgaacaaacagcaggcaccaaacaccctgaaactccctgagacttagatatggaggcagggaggaaagactagagctttttatcagaacttccttcttcactttccaggcagttacagccaggagtgtgagaacaggagccctagcctctacttctgtgacttcctgtacttcagtgggacatagtcagtcttgcctgaactgatgaagcatcacatgccaagaaactagacagttctccactattcctttcccctctcccgctcacacacacacacacacacacacacacacacacacacacacgcgcgcgcgcgcgcgcgcgcgcgcgcgcgcacacacacacccctacctccagtgaatgaggatacccagtcaggcaggacgcaggtgaggaatacaggaactgtgcccccaaggtaaccagtaaagcaaatgctttggggtgtccatctagtgctccctctctacccagccacaacttctcttagttcaaaggatgaattcagaaagttctatcttcaaactgagtatttccccactgaataaccttagcagtctcactctgcgcttactcatggaatcaaacagagctagcctatttgctctctctctctctctccctccttccctcctctccctccccctacctccctcccccccctcctgcccccctctgcttcattagcaagaatggcgaatggcaaaaacacacatggttccccgaaagctccatttggtcggacgctgctgtggcactggggagaaggaatatggccagatgatgtcatatcagaccagagcctgctcccactagcagaggacatttgtcaaggtctgcaggccagattccagtcctgaggctcttgggaattcaaggagaaataaatctctgcgctcaataacgatggcatttgtattcacctcttaagacaataattggcacttggtcacatttgtcctcacttgttgcaagatcttgtccttgtctctatagggagttgccaagcaatctgactttccaagggaagacaaattcaatggtattagtttcgtgtgaagatcaaatgtctggtgacaggaaccaatggtcagcacacggtctctgcagtgtggaggcagacgcaggagtggttttggagaatctgctgtgattccaacttcactgaagggctcctgacaacggccccaatggtggtagtgctgctttccaggagggtgggggaggggggaatagttcaaatgcagaagcctgggatcatagtgtgcccttttatatgacatgtgagcatttgagagtttcaggagtgccactgttctctagacagattgactgaaacatgggaacagaacccgaaatgactcctgtgccagtcaggctggtgctgtgggcagagaggcgcctgccagccactactcatggagagatccatggagcaggaaagacaagagaaaagccacacggttgagtgctggctctaacagctgcttctttccaagggagaaatattccaaagatgccacagataggtgccctttgattgtattttatggttttattttaagaaataaaaactgttatgtgtttgccactgctgggtagaaacgatggcttctgatgttctgagatgagtactggcatcatagatactttttatctccatgatgtaggtgaacatcgcttagtcctgagaggtactcaggtccctttagggataacttatcaatgccatctcctgcacagggcagggatcattccagcctgccatcttggctaacttcttttttaagtgtgtgtgtgtgtgtgtgtgtgtgtgtgtgtgtgtgtgtgtgtgtgtgtgcgcattctcatgtgtgtgtacctgttcatttatgtatgtgtgtgtgcatgtttatatgtatatatgtgtgtgtacctgttcatctgtgtgtatgtgtgtatgagtgtgtgtatgtgtgtacccgttcatctgtgtgtgtatgtgtatgtatgtgtgtgtgtatgagtgtgtatgtgggtgtgtctgtgtgtatgagtgtgtgtctgtgtgtgtatgagtgtgtgtgagagtgtgtgtgtgtgtgtatgagtgtgtatgtatgtgtgtatgtgtgtgtgtttacatgcatgtgaatgcatatgcatacctgccatgatgtgtatgtagaagtcagagggcaatcctgggtataagtgctgaccttccttccacctttttgagacaaggtcagatgccagatgtctcaactctaatctccctgtagttcttctgggattatagatgcccatcaccacgcttggatttacacaggatctgggggtctgaactctggtcctcacacttgcaagtaaagtgttttattccctgaggttttttcctcaaccctcagctaaccttttcactttgatatgtggaacttaacagtgttcccttctcagctctaattatcaaaatatacattcaaacattaccactaaaaataatattattttcacatttcctataataaggcttatgacaattgtgggaaattaagaagttgagtctgtgccctttgttctttcttattttatttatgttttatttttatttttgagacatggtttctcagtgtagccctggctgtcctggaactctgtagaccagactggcctcaaactcacagagatttgcttgcctctgcctcccgagttctggaactaaaggcgtgcgccacaattgcccagctatttcttctttttaaaggaaagagatacaaggaccagagatttggctaactccattcaaatcaaaagagggacaacaaggagcagagctggaagtaaaatccagacatgtgaactgcaacattttaaataaggaaaagcatgtgcacagtggagccagcagagtctggagcatgggaaaattcatgtgctgtgctggaagtggctgatcacaacagtgaggctgtggacagacagcactgtggaaagaacccgaagggaaggtgtgctgcaggccactgatcctgagtgagccaccatctgggtcatcagtctcatctactattgacaaaattggaccagttgctctctggggcctttcattgagtatatttaaatgtcccatgagtttgtagccaaactttaaatccttctctctcttttttttcaagcttcctgaaagtgctaggattaagctatttcaagacttagaacacataagataaataccccaacatcctctgcagaaccaagatccactcaaagacacactgtggtgttttggggttttgtttgcttgcttgcttgcttgcttgttttctgaaaagcaagcagaaactctgcatgtctaacagctttcccagctccagctcctggagaacattagctggttagacagatcactggactgtggacctttcaggaatgaataccctttgtacagcagaggtaaagacacccctgtatgtctgcccgaagcccgtctgctctctgtaaagacactctcagagccaaagcctggcctggtccactactgcagtcttcaggagcagatcctgtcgaggatcactgagcagctaagagaaggaccatcagggtggatcagggtggccggttctctgtgcttaaacctgctctgctggtcctatttttgagtgtgtgtgtgtgtgtgtgtgtgtgtgtgtgtgtgtgtgtgtgtgtgtgtgtgtgtgtgtgtgtgcatgccacaatatatgtggggtgtcaggataatcttgggtatgggttcttaccgtccgcctttttaacagggtctttaatgcttgccactgtgcgcaccagggtagctgacccatgatctgcctatttctgcctttaccttaccttgggctgggattagaaacacgctactgctcttggctgtatgtgtggttcatgctcattaattgtgcaactgagttttaaagatgcaaaagtaagtaaataaaaccaccccacctcatactgttctaagtaagtttacaacttcatgctgacccatgtttacagctactgtggttccatgtggctcctgggtcacaggttagacacagctgacagagtatcacacagttgaatcaaacgcctacttccgttgtcttcagtctgcttgggctaagccctctcacatctcagttattcctacctgacagtttctgggcccgccggctccttttgtctttgtctatgttgaatgtatctgttgaggctatagtccaatatctgacgtcctcctggtcattctccatcttacatgttgagagaggctcaccaactcagccggcccagctgccagtctccattctcccttcctccagcagcactgaagttggcaccactgcacccggctctccacagatgagtgttggggagcaaacccaggtccttagtgcccatcaccaactgcactcaccagtaatcctcttttgcttttgattatcaattttcctcattaattattatttctttattaacaacagatctttttatttccctctctaccctcaactgccacgctacttcccgtgtcaggaaagcgcatgtcttactaatggtaggtgccgctattgctctttttattgatatcaaaatcaaatatgattcccgttcctttgtatactaaccacaagctgaggtgtacgcagaagcagagaagagtccagtattgatgcatagccctgaggtattaatgaatgagtcctctaatttatgccccgagggctagtattttagccatgttgaaacccacgtactccagagagaagcttatctctaatgtatgtttccagttatgacatgaggtcatcattggaactccgtgtggaagaagctagcactctatccatatgcaagttgttttgtcccctgaaaacaaatgggagctcagtgactattccacctcgtggctctaaataccgtcaacatgccaaagatccccaaatttatatcagcagcccagacaacttcctggactccagactcatttatccacctgcctgtcatctccctatagacgtctgctgaccaacttaaccttggtctatgtgagcggaactcctgacactcgtgtgtccctctctcacctcactccagggctgccccatcctcctggcagattgatccaaagttaaggacagctaaggctatcctctgtccctacttactccacttaagcagaaattctcctggctgtccttaaaatatgtccccagtctgacagcttccacgtgtatgctgcttctaccctggcctgactcacccaaattactgcagttagctccacactggtctcatttcagctcattgctatctacccacaggctacgttcactcaacatgcagccagaggaggcaccacctaacgtggtcagatcacatcagaaagctgctaatggctctccatttctcataaagagggaggtaagtccttctactcctagacatatactaaataagtgaaaacatacatttacacaaaaacatgtacactgccttccagagaagcattattgacagctagaaagggtaaccacctaatatcagtacaaataaacagacaatgtgtagtgtgtacagacaatggaatattagaaagacataaaccacctaacggtcagtacaaataaacaatgtgtagtgtgtgcacacagtgggatattaaaaagacataaaatggaatgaaacactaacaatatatataggccacagcatgggtggactttggagcatccagttaattgaaagaagccatacacagaagcccacatagtacatgatttcatcgaatggaataactagaacaagccagtccacagaaccatcatgtagatattctgaaaagagactagcagggggattggaggagggagaagatggaatgacatttatgaggtagactacttcttttgggggtgatgaaaatattctgaaattaataatgatgcttatgcaaaactgaatgtcactgaagtctaaacttaaaaggtagatatgagaaatgtgatatttgtgggtgtgtagtataagtgcgtgcgtgcgtgcgtgcgtgcgtgcgtgtgtgtgtgtgtgtgtgtgtgtgtttgagtatgtaggtacatgtgtaggcatgtgtgcatgtttgtgtgtatgtgggtacatgtgccgctgtgtgtgcatatgtacatgtctgattatatgcatactttgtgtgcaccagcatgtgaggggtaggtgtgtgtgcgtgcgtgcgtgcgtgcgtgcgtgtgtgtgtggggggggacagaatttgactgacagtgttgttccttaggagacttccacccaccttgtttttctgttgtttagttctttgttgttgttgagacagtatttctcacaaggtctgtagctcaccatttagactgagctcagggagccccaggggttctcatgtctttgcctcccctgtgcttttattagaagtgtgcactagccctggcagtggtggcacacgcctttagtcccagcactccggaggcagaggcaggcggatctctgtgagtttgagaccagcctggtctacacaagctagttccaggccagcctccaaagccacagagaaaaaccctgtcttgaaaaagcaaaaaaaaaaaattaaaaattaaaaattaaaagaagaagaagaagaagaagaagaagaagaagaagaagaagaagaagaagaagaagaagaagaagaagaagaagatcactagcatgccctgccttttacataggcgccagggaccaaacacaggtcactacacttgtgcagggagcacgtcatcaccctgaggccctcccacaccctcgagtcttgcagtcccagtctcctggggctatgggactcttcccacgattcctcagactcttttccagacaccatggcttcttagctattctttccttaaccaccacaccaggcctcctcagaaagttccagaaacccctccctgccgctgtcattggggatatcaaccctgtacataggcctggtcacttgcatttttttcttccatagtatttaatttatcatcttcaaactaccacacaattggtgtatacattatgtttgaggtgtgcagcccatagccacctcttcccgtcccacccccactctatgctccttaagcaaagaaatctatttgtttcagattctctagcattatgcagtacagtgaatacttggaaaatatttttgaaccagtgattgaattctatttctttagcattatgggtgtgccttctgagcaagtatgtagaacaaaggacagtgaccgcttgctgtccacgtgagactgggtcatccccatgaacacaggacactactattggtgatgctcaagtcccttcatataaaatgacagtgtttacaaataacctgtgcatcctgtatactgtaaataatccccagattagttataatccctaatccagtgtaaatgctatgtaaatagtcattactcagcactgttcaggaagcaataacaggcaaggctaacagtctgtcaccattggcacaaacccaagttctcctaagatttttgatccaggattggttgaatctatggctataaaacctatggattcagagacaactatatttcattttctctaggaaaacggggggtgggggtggggggactgagatgatagggcatccaatagaaccacgcatcctggctttggttatggctcagctgcacagtgtttgcaaggacctgggttccatcctcagaaacacaaaaaagaagacaaggaaagaaagaagagcgagagggagggaagaaagttgttagtcccagataaatgaaaaacagtgttgaaaagagccagttttacagtttatttcatataaaccatgaccctgtttaaatatcttctcatttttatttatttatttattcctttgtttattaatttattcagtatgtgtgcgtgcgtgtgtgtccgtgtgtgtgtgtgtgtgtgtgtgtgtgtgtgtgcgcgcgcgtgtgtgtccgtgtgtgtgtgtgtatgtgtgtgcacgtgcacgcacacctcgtgcatgcatgaaggtcactggttgaccgcttgtattgtttcccaggagccatctaccttgttttttttaagacagggtcactcagtgtcatagagattgctgatataaacacctagagtctcctgtctctaactccccagcactgggataacaaatgtgtgccaccattttaccaactgggctacctccctagcccctaaataaattttaaaataataattttttgaaattaaattttaattacataacttcccacattcctttttgtccctccaatccctcccatggacctccatccctcactctctatcaatttcatgccctttgtttccttaattattgttacacacacacacacacacacacacacatacacactcctaaatatataaacacaacctgctcagtccatagaatgttacttatatgtacatgatttcagagctaaccccttggtattggagaaccaatttaatatattcacaattatgcacataataatggtgtcaccatggaaacaaagcatttctaccatacaacacccttctgcagtcaccccatcacacacacacacacacacacacacacacacacacacacacacacacactcctccagttctaaggcattcactgatgtacctctgtctcaagatttccctgctcagaacctacctaccatataagtggaaccacacagcacctgcaagcagcactttgcatctgccttgcttcatctaccaaaatatttccaagatctacccatgttgcagcatgcattagtacctcattccttttcacactgaaaaacattccattgtgtggacatagtctaatgacccatttcttagatagtggagactcgttttttgcttctacactttggctattaataacactgctgttcctgggggtcccatgttgtcactgctcttgagaacatatgttagagggcgttgttgtccatgcaggagctctgttttaaactggagaagcatggggctgttttctacaagaaatgcttcactttacattcttatcaatcgtaagcaatggttctggtttctccacatccttaccaatgccccaattcattgtctttatattacacccatccctgtggttaaagtgccttcctttcgttgtcttgatttgcatttcctatataacaaataaagatgaacaactttttgtgtggttattggccatttatatgtctttggaaaaacacttagcaaaatcctctacccatttgtaattgggttgtgttgctgagttagttataagtgtagttttgaattctagacatttaatgcttttccaatatatgatttgtaaatatttcttacaattcccctcactggtttttagccctacccacacaatgacccttttacctgccttagagatggccactaactgttctcactgtaaataaaagtgcccagcaatttctttctcgtgtattcaccaactgaggtttccccaatagtgctggggccactggcttgccagtgttctcttactgtctacaactggtcattttccctaaacaaagggcaagttgcatcagcctgacagcaagagcccaaggaaaccacataatgcttacatacacggaacacaaatggtcaggcatggtgacttccatttcacatgtacaaataagatgtcatcctatgcatcaggaatgtgcagccggttctaggtagctgcctgagaaacttagtctaagaggcagaggtctgggcccattttcagttgctataacaaaatagccaatacttaatagtctataaagaaaagacaccgtatgtgttccacaattatagtagctaagatgtccaaataatgtagtgccaccattttaccaactgggctacctcccaaacaaaaagaaaaaagaaaagaaaaagaaacccatgtgtgctatggcaagattttgaaatagttaagcttctaagcaaatctaaatcatccatttaaagagcatgaaacatccatcatgacccattgcataccaatccttacaaacaaatgggcttgcacccagaaggaaagagttcagaaagggggtgccatgtggttgtgtggtagaccatgaggttagcaggctgtgatggctaatagtgactgtcaacttgatgggattgagagtcaccttggagacaaacctctggacatgtgtgtgagcaagcttatagactaggttaattgaggcgggagcatggcacagactgggatgctaagcctggtaaaaaggaacaagtgttcatctcccactacttcctgactgtggctgccgtgtgaccacccacctcaggttccagtagccatgactccctcaccatgactgcctagaccttcacactgtgaagcaaaataagacctttttgctcaagttgtttttgtctagtcttttgtcacagcaactaacatgcataaggtcctgggtccaatccccagcacccccccccaaaaaaaaaacgcacccctactttcaatcaacaaaaacaacaaaacacacaagcagataaagaccagccatgtgcaccctgaaggtcacgtgaccacagctttgccctccatggaccctcccacctttaatcccctctgaatttttccacaagtcttgaacacactggcttgccagtgttctctcactgtctacaactggtcgttttctctaaacaaagggtaagttgcatcagtgtgacagcaagagcccaaggaaaccacatactgcttacatactcaggacacaaatggccaggcatggtgacttccatttcacagcaaacagttatgtgtgccccatttggccacatcagggaggcattataactttcctttttccatggaggaggctttacttagacaaagaaacagacatctaagcagatgtattgaaggcctgcacaaggggccccggggatactcctggatgccctatcaccttgaaagggaaattggcagctgccttatctgaggcaggaggatgaaggggcaccagagggaaaaggccacctaaggcagccacttgctcatttatcaagcactttgaaaggaaaatgctgcatacatataatcaatactaatagtgtgataaggctgtaagagccaacagtctgctggtgaagtctttgccagcaggactgcataggcatccagccatccatccgtttattaatgcgtgcaccatgagccctcccataggcagagtgctggtcaccattggacatcctaacaggagcagagatgggcctgcaacactctccctacgtatctttgcatggttggttccatctttgctttccacatgtcaggtgctgtctggtgtgtttgctgcctgtctccactttcataatgcaagatctatgagagcactgagcttgccattcctgctccccggcaccccagtacctggaatcatgccaaacacagaggcacaggctcaataaacacttgtctaatcaattaattaatcaatgtgaatattacatatacagacccccacactgttgaggcaaaaggcaggggctgccaaaacaggaagtcactaataaatacaggctttcattccttgatagaacatatttcagtacagaaaaactaaaactcgtgttaacaaaatatacatcgaaaacactgtaataaagtttgtcaacataaatgctccttttgatttgacttctattccttcctaggtacctactgccaatcaagagtttaaaatgacaatcaaggactggtacattggctcagaggataaaggctgtgtgaacgtagatatttgagtcaaccctagagtccacataaaagagacaggagagaatgggctccacaaagataagatgtccatggcaaacctgacacacatgcaaatatatatatatatatatatatatatatatatatatatatatatatgatttggtatgtttgcctgtaatcccagcctgaggaaaggaaaggagcacaggggaaatctgtgggactcccaaaccaaccagacaaggctttttggcaagttccaggccagtgacagatgccatctcaaaaaataaaaagctgcacagcagctaaggaatgacactgaggttgcttctggactccatacacacaagcgtgtgcacccatatacacataacatgacatacatgttcacacatgagtttaaaattaacaatgaaaagtggaatagtcttaattaactaattctttttctatgtcctgacaaaatactgaacaatataaggctttctaaatgtagcaatacatttagaaaacaatgtaaggactcagccctttattcatgtgcgctctctctctctctctctctctctctctctctctctctctctctctctctttcttcctttcttttttctttttccttttgcatggatagagatgtaatcaaggacctcattcatgctaaataagctcatgaccactgagtagcacctcccatccttccgtctaagcaggaacaagtttcgattaaaattcctgagccagttatcaaatattcacacacacacacacacacacacacacacacacacacacacatatatataaagtgtgtgtgtgtgtgtgtgtgtgagtactagggaaaaggtcttttcacagaaaacatgggggaagacttaaggttttcaagaacaatagagtttgggtgagttggagagaagagagggtatcccaggctacacactttgattattcagactttgagcggctcagtccgcatgatacacctgacatcgtcaaccagggttagacctgacggtagatgtccccgaaggtttgtaagtttggagggcttcgtaaagtcaatgtctgggtaaaggagagataagctaggatgctgaaatggccaagcttggctctgctgagcatccaggtcaggtggacatggaaagaaagccctggatttaagctgcacacacacacacacacacacacacacacacacacacacacacacacacacacacacacacacacgtcacctacaaggccacctaggtgacttgcatgcccacagaattccctccagtgtcactcatctatctcacccataaactacttttgggcacccatgcaattgtgcacatttccttctctgtaaaatcttgaacttttaaaaagctgaggctggtttgcatccctcactcagagcccagcacggtgttgtgggtactctgggcatgcagtacaagttcttctcattgatgtccgggtaaactgggtctggggtgtgtcatcacatgactctagcttttccacctcattaaaataagcctgtgtgatgacaattccatgttaggataaacacagtatgtgcttttacaagtctgtgtggcagcttttaaaaggtctgggaaatgaaaagtcactttaagacacttccagatgctcagagctgtgcttcagccccacctggatttcaggtaatcaggaaaaaaaacaaaacatggcttcattatggcacaggggataactcagactgaaccatgacagctctcggtgcaggtagggaatattaataatatatgtgaatattaataatacatactaaatgtctgaagaggctgtcaatcaactgtgctacccacccctgtttttaatggatgccaccaaagaaaattaagccacaaaacctctacattaaaggcagttaatggcttaattttaataagatgaaaggcaaggcagtttcaagtccaggcggatcagccgtgcctggccttctccgaggatcattccctgtaggccacaacacaggagcacaggagagtcagggaaacatgccaacgcggggtagaggcgtggctgctaagcaacagcaggctgatcagagcaaagggaggtcacttcagctgcagccctgtcttcttcctccatagccggtgaggaggaagcagcttccttaaccaccctccctccttctgtcccactgaggagcaaagcacagcaccagtctacacaatacagtatgtgtgtgcgtgaattatataccgctaaaaagacatgtacgtttcttacctatgtctatatttatatttaaataactacttcagcaagtagtctcgcctgctgaagaaatgaggagtgttttcctcatataaataaataaataaataaataaataaataaatagttaaagcccccaacttaacagtctagatacagtctagataatggctggaagtaaataactaagtgggggggggggcagacacctaagcttttatttggattttttctgccaggcttcatgagtttttaacaaagaagcatgtcagtcaattcagttacaacatctctgttccccatcttagatcttcccctaagatctaaggattccagacactatgcttctgagccccgttccctcttttgacacactggtcagcaggttctctgtcttattcttccctcctcaacctccttgggttaagagctcccagcagtcctgggagccacatgaggttctctgaagggaagagtctagatcctgctgcataggaaggacgcatgaggccaggcgagcattccttccacacagaatgggaacagaagcagatccacagctggtgtctggaagagaacagggacccagatcttgtccttccttgtcctgctcaaaagtagtggccccttcagtgtaactttctgtcacttactaagggaggtggctgttttctctccctgaatctctggaggaaggaggatccctgtggaagcctagaaataccatcacaatgcggggcaaagaatggtgaatgctggacatgaagttgtgcagaagtttctttataattccaatcttcggaaagaatttgaaaccttctacctgggtgccactctcccctactccggcctcacgtctgggaacttcaatgacatctctacatggacccagaggctataggtcaaagggcaattgctttaggtatgttggatctggttctcagttgggtttggcagaatctggagcagacacaccacttagactccagggatggctgctagtatgcaagccacatccccctagctttaaggcagactatggtaagaacctggtgaaattcagacccagagagctccatcttggggtcagtcaatgtagaaacaggaaacagaaggttctggtaataacccctcatggacccagccctgctgtgcttcattcacgagcgattactttttccccttggtccagattcccatctcaaaacccaagggcaatcaaaaccagactttgcacaaataaagtagcatggacatcagaagctgcctccatgaggcaccatcctaccacaggctcaaatgggagcgtagacccagaataaacaaacagcccatgtcttcctcatcatcatcccttcccccactctccatgtatgtcacatacagatgtgcaagtatctaacatgtaagtggactaattttaatcatgggatgctcagagacgctaatggtcttgccgaattattagatcatactgtccaaagctagaagcttcctggctttcttcctatagcttgtgagcagaaacagccattgtcatcatctccagcaggatggtgcatgtttgtaccccaaaccctgcatgattttattacatttatactaaagccatgggttgtgaattcctttttcttggagtaagtgtcaattatcttaaagagggagagcttttaacacatttatgggaaaaggcattgtagtgtttagatcaaaatcctcacaatgtctgcccaacagctcacctctcccttacctacgcaaacagaagagatgctaggggctggaaatcctccattttccttcccatggtgacttttgttaaccttgtaaattctaggcataagtcttcctttagataaccagcacttaaaatagtcccttaaaatattttaggctgcagtctcctccccttgatcctttctccaatagcttatttattccttcattgtgttggaacaggaaaagaaatactgcattggctggcccaggcagactgtgggcagccattcattcactcagctgttccagacttaagaagtcaacagactcgatgttttttacccaggaaaaagaaaaggtccccatcggtccaaatcaggactctacaatgaagtccagagattggccaaaggggtagacaagtgcccctggaaacacaggtctcattttgcatgtttgggcattattctggtgggcacgcctactgttccagtgaggacgagaggtggtatcttttttcctctccttactctgtgtcagaaggcagcctaacgaagctgcctcagcagatgctacaggtttggatcttaagtgacccctgcctcaaaggcttggtccccagtgtggcactattaggaagtggtggaccattgaggagataggactccagtcccttcttcctcttttcacttccttgctgtgagcttggttctccactcacccttacccataacatgctgtcacatcacaggtcctaaaacaatggggtcaaactgatcagggacttggggcatcattaactaggaacaaaaacaaacaaacaaatgatccttttctcttcacacaatgattgccttggttttttgtttcagtaatgaagagctagctaacattacagctttccttttaatttcctgttctgattggctagggaggagctcagacacaggagagcacagaacttctgctctgtgaagagacagaaactgtctgaacttaaccagtgccagcctttctgggctgccactcctgtggggtgtggtcatgtcttcctcctgcctgtgggtagcaagagactatgcttccagggccatcctgtagctttcctacccctgccacatctctttaaataattctttgcgaaaaataattcatcccatagaatgtgtcatccacttctggcaagacctccccaacttttccaggggttgaaaaaatgcagtaatgcaggcagccggcaggtctgggatctggggagcctacagcagtgggtacacatgactcagaactgtctaatccccgtcctattgctctgtgccacagtttctggctccctctcgattggtttgtactagttttgaagttggtatgctctccaggtcataacttcagtgtttgtgctctgggcattggcatgtaacttcagatcagtaggagtccctctgtatgacacaagcatgtgatcaggcgcacgtgatcatttggtcaagagaactaaacacattttactttgtctggcccatcatttcctaaggaatgtgcccactcccctccattgcccagggcgatctcgacacattcttgggcacactgcttcttccacagcacctcctgtttcttttcacactgctcgctgtttttacgcaggtgttccatgaaaagctggttttcggcccgcacacggtatttttcctctagtagctgcctgctgtccttccgcagcctttcccgcaggcgtttattttcttggatttccttcagtgccaccactgtcttccgtttcccccacctctccaatttcatcagctacttgagttatgtatctagaacagtaaggtgtggtgtgggcagaggggcacttctgagactctggaaagacatgttccagatccaagagtccatgaggacagctccacaggtcaaagaaggcaacctccgaggagcaagccctggtggtaatcgccgtccactcagagcaacctgtctatgctcaaccagccggtaggactggaagggtacaatctgtttttcctgccagagcagctggtggtccaaggatgccttctgacccccacattctccagaggtcacagaagcccagtactcctcatttcaagctacgagagtcctttccagagaaacccatctgtccgtgccctcctggggccagatttccgcctctcaggatgtagaactctcgattgcttctccgcactgtctgcgtgtcagcatgctgccatgctgcccatgatgatgatgatggtgataatggactaaccctgtgaacctgtaagccagcctccagttaaatgctttcttttataagagttgcctggccatgctgtctcttcctagcaacagaaccctgactaagacagagagtaagggaaaaccctgacatacaaataaaaagtatataaaaagatgattgagtctaagggctaaagtgttagctttctcttgctatgaaggaacatctgacataaacaagccagggggaagagcaagccattttggctcatggtttcaaaggcatcacccagcaagctgataagccatgggagaacacagcagttcacatattgatagcaataaagatgcctttcttcctttttatatcagggattttgttccagcaacagagagataactgatacataaaggaacagatagaggaaaactagaagggcaaggacagcaagactggatatagccaacgtctacccattttccagagggagacgaggggtttgcttattttttaatctctgcaacaaagcagtaacaagatatatttcataataaatcatgaaaaatcattagtggaaaatcttagaccatgaagcttgcaacccaatattcccagctagaaaatagagggcatggatttgtctttaagctgctaatatacaatgaaatctcacattcatccacccctagtttcctgaaattgagtcaaactaactgacagaccacatatgactcttacaacctgctacttcctgtcacaccttgactcacaatccacacaaactgaggtggccccagagttagactaacgacagctgcaccaagagcacgggaaatatgccacacagagagagatcaggacaatgctgcctccagaaacctccctaaccactgccttcgtgatcccctgaagtctgtgaggtcctttgtgtccctagctttgctgctctcattctccagggcattctggctcttaggtaacctttctaatcaagaaaaaaaaaaaagaagaaggaaaacccatcacagtattgatccttggagacacatgatgctatgggacctcaggttttgtcactgcataaattctgacctcacttctgtgtctgagatctgggacatggcaagttgcctaagtttcctgcacttcagtttcctcccctacaaaataggaatggcatatctactagggctgacgtcaagactatagacaacacacatagtgggtaaacccaaatggcagctggtattcttattttctctggctggcatacacacatcgtggctactctgctttctaggacgtttgaagaggtgggctttcttccgaggacagtccttctaggaaagcatgggtagaagacaaggaatctcagcagcctatctcatttcatgtgccatccatcacccattctgttggacttgtgtgtgtcttacactacaccttgtctccaatctggccataagccagtaagcaggcaatgtctctctgtatcttccagagcctgcttataggtaggattcattcattcattcattcatcattcattcattcattcattcatttgttcccattgctgtcttcctacaaggctacacagaatagacttcttaaatcagaacacctggagttcaaagccccaacccctgtggttctggcatctcacatcaggaaccaggtgtctggaaaaatggaaggtctagactgtggcttgaggaatttctgcacctctgctttctcaagtggctcttatgaatggaaaacaatatggtatctataacggttatgaccacagacagtggtaccccaattcatgttggtatttaccacgaatactgtggttacccagtgaagatgtgaataaaggaattcatgaccaagacagtcactttctcacacttagaggaagagactccgagtgtgttagaaaatcatttatctttttgtcaagagaatttctcccctagagaaacataaacagctcccagcacctcctcataaggtcccagtgacaatccaaagcacagttccaactagggaaccaatgaggtttatttacagagcattgagaaggatgagtgaccaccaaacaaccacactgggaaggcttcaccagcctggatggtggcttccccatcgtcatgcagagggagttccccctcagttaacttccctgagcctacatatctagcccttcccaggacccctagatcacatgtgctccaagaggaaatatatacaaatggctaggacagtgagaatctcaggtgagggtccaaagacacctctacctcctctttctgtgagggaatgtcagtagtcactaagcctggtccttgtggtcttctgcaagctgggacagctgatgaagatgatggctgccctgctaggaagaaagctctgtacaacgcatttctactcaaaacatcctccttcaagacataaattaatttacaaagcagcaatgaagttcagtgaatatgggcatctgctctttgactcggcatccttggttgcacagggaattgctttgctatttctgtagcctcatatgagacagcacacataacaactggaagatgcaacacagagcttctagatgctttgagagccatagggcagtgtccctggagaggccgcaaatcagtcctagtcagagatgaagcaatgcaaagggatcagaagtcagttattaatttccttcctccttggtggtttctcccaacagattctcattgaccactaccatcaggcctctctctgtatgcttactgacagtctagacactgcattgactggttgagccttcaaaaacctgtgagaagttagaaccgaaaagccaacttagaatgtttaccatgtcacccctaagcaatccaatagggtttagaatagtggttaaactcgaacacacacatgcatgaacatgtatacacatgtacagnnnnnnnnnnnnnnnnnnnnnnnnnnnnnnnnnnnnnnnnnnnnnnnnnnnnnnnnnnnnnnnnnnnnnnnnnnnnnnnnnnnnnnnnnnnnnnnnnnnnnnnnnnnnnnnnnnnnnnnnnnnnnnnnnnnnnnnnnnnnnnnnnnnnnnacacacacacacacacacacacacacacacacacacacacacacacacacacactttcttcaaagcccacttagctctgagagcagaaacagatatcaggagctttccatctttagtgagtggacagacacttggattccattctgttccttacaggagaataaaatgactgtggcctgcatctgctttgttgggtcttatccaagtgtcccgggcaggaggagctgctaggtcctcatcagcctccacccagctctgtaagagcccttgctgggatatctggtgcctgggaatggtctgcatatctgtcgaattcacaggaagtgggtctcttcccatctttatacccctgtatggttgtggcacaagtgcaaaggttttgaaaaacccatcaggttgatttgtgccatggggcaaaagtagtccctgctgggtttttaccccaccttccaattctttttggttttgctgatttagaacaaagttcttctagttcaagagatgctgaagctgagacaggcatggtgatacacatcattagtcccagcactcgagaggcagaggcaggcagatctatatgagttcaaggccagcctggtctacagagtgagactctgtctcgagactctgtctcaaagaaatccagagagggagagagagagagagagagagagagagagagagagagagagagagagagagattccaaaactgcaagcactcatataaatgttatatacatacacacattatatacatcatggacacatacacaaacacatacatgcatacacacatcatacagacacacacaaataaataaatacttaaataataaaataagctgtatgctctcccccactgcatcgcagggcaagcacagtcaactgcacgaggagatagatgagtgtgttgtaatcagattccaaaagtggggctaggttgtcctcagctcagatttcaccagctccttcctgatctagacccgttctgccttaataacattcttgagacaacctagaacgtttctggatttctttattcttccatggactccaagtggggaaaaaaaatattaggagaaagggaagagaacttgatcacagactttatactccacatgcccaagctttgtgttgtcctttcatgccacgatagaaacaagagcagccagatccgccagactgtttagatcattttccaatctctcattctgtctcgttttatttttaaaactatgttctcttttattaatacatgttatgtgcacgtattatgggggtctggtgtggtattttacttcataaataccacatgcactgactaaatcaaacttccttttggccactccacccacccctcacaatctccttatgctggagtcaccactgtcttacacttaggtcaacaatagtccattccgggcatgagatgggttgtaagggtacttgtcatgtagtttgtcctgttttatttaacacaatgtcctccaactccacctgttttgccaaaaatgacaggattgtattattctttatggttgggtgacactgtattgtatatgaagagtacactttctttctccattcatctgctgacaggtacccagcatctactgccaactggttctcaacaaaggtgccaaaacacacaatggagaagggacagcctgttccaacaatggtgctaggaaagctggacctccatatgtgaaacacagcaagtagacagagctcattgtgggggtaaaaatccactcaaaaacctaaatttaagacctgactaactgtgacagcattcaggatctgagcactagcttagtatgtgtgaagcgactagtgttggcctgaatgtaaagccacggtgaccagagcacttgcctagcctataggagtctctaggttcaatctccagagccagagaaaagagaaatcaaaaatgggcaagtaagacccccaaactctaaaactaacagaagaaaacacaagagaagcagtgactttaaatgtttttgttttattaatttgtttattattaccttttgtctttttggtttgggtctttgggggtgcattttttttgttggtttgttttgtttcgatgtgatcttgctctgcagcgctggctggctcccaactcactgtgtgaaccaggttgaccttgaaagtcacagaaatcctccttcctcaggcttccaagtatttggattacaggtgggaactatcacacccaactagtgctacctgacactataatctcaggaaacaaaagcaaagatagacaaatggagcctcaccaaattaatgccgcccttcaaacaatttctgtttctgcttctccagaaaatagttccattttggcttaagaactccattcttccagctcaggtacccccaaagtgcccatccattctttcattggctcatcaatcctgagattctccatgtccaggtcctactctgcgcggcatagtcttaagtggtcacagtaccttgtgcacaagcatgccacgtacacagaggcaccagttcagtgaagtctggagaggtggctcagcagttaaaagcactggatgctcttgcagaggggtccaggtttgggttccagcacccacagggcagctcacaactgtaacccaagttccaggggatttggcgccctcatctggcctcttcggacattgcactcacatggcatgcacgcatacatgtgggtaaaacacccacacacataaaatagtaatacatgaatctaaatggataactagataggaaaacaagaagatttagaaatccaacctgatgggaagaaaagccacaacagaggagataggtaagaagcaggacttacagaaactactgattagctctcttggatttgcgatttttccagaccgcaggatggaaataattggctgtttgcaaacaaaatgcagaaagaggaaatgcttggtctaaagctgtaattagcatgtcagtgccgtctgtgatgtgtgcacacaaagagaagtggcttcctcttccacctctgcatctccttctgaaatgggcctgagtgacaggatgcattggaaataaggctgcagactatccatggtaagacctgctcctaccaacgttcaccgttgttccaaatgatagtggaggtgatgggcctaggggaattaccatgtgggagatgactgccttgcttttatttgcaggctaaggacgctaacatttctcctaactgggctcacgtcatatttgatgaatgctcaaacatgattgtaccagtagcattttctctgaaaattgcagcgattactcattagcaaatgaggccccttgggcaaagaatctgggcagaagactgagtgccgtgttaccaacacatgcaacaaattaaccctgaaagtttggcacttcgaatgggattaaagtgttgcaattaaaatccacatgtaggagattacatccattactgctcctaaaaaatttatttgacctttctagggcaggttgcctatcctagcctaagagaaattaaaaagtgcatgaagataaacaatgtgcctccgtgatcaaacaggtagataaagactgaattgaacatagtgcagacagagcctggaatggacttagatcagactcatcagcaggtgttggaaatccagtcaccatctgcttgttcttccaaaccatggagcaggagtaccccacccactaaggctcttcctttcttcagagacactggctagtgtttttatctcatggtatggctggtatcttgctcccacctggagcttggactctagtaagagataggctgaaagacagttgaatgggtctctgttatttgctattgagcctgggcaagatcctcagtgttaatatctctgcttcctaaagcagaagagacaggggaggaatgaatgcacaccctgagagcaagtctggcccttcagcattcaaaattaataactggcataatgtatgcaaaacttccttggggaaaatgcaagtatgtctatgttaccttaaaacacaaaaagcaatttggcagcctctaaaaaaggaggaggtgcccatctctacaattgaacagcctcatcactaccttccaaaacttgcacatggacacaggggaggcgatgacagcattagtggcatgtgagcaaccacaaaacattaggatgatgatgagcagaatggataaataacctgtgatgtttccatagggtagagcaacccctccccaaattattaagatgtgtcaatctcagaagcataatggcgaataagaaatgttgcaataaagacatcgatggaaatatttataaaaatgctaaaactgtgatacatatttcacattgcttagggaaacatgtataccacaggtgtatagaccatgtacttctggaagggaagaggagagagatgaataagggtctgtagagtctacaactatactgctgtcttatttccttaaagaaatgatggatagggacattgtgacttataagctttctgacattattcaattcatagtttgtatacataaaatattgcttgatttgaaaaaaactaagctgtactataggttttgctactatttgttgttttgtctgttttaaggtggagtccccatcagtagccctgacctcagattcacaatctccctgcctctgcctcctgagttctggggttctggtgtgtacagcacactcactgtgtgcttttgctttggttgacaaccactaacatttgaccctttgataaggtcacaggtgtggcatgttgtttactttatctgatagctaactttcctaggacaattcattataaaagctttcctcatggagaaagaaactcctaatggagaagaaaaaattctcatgttactttactaaccaacactgtacatcaatggcatgtttagataatggatcattctctcattaaaaagcatttatgtaaccccttgagtaggcacagctccatggcacgtttgggaaatgataatggggttacattatagaaggagactggccactgcagcttcattaaaatttaaaatattttagtaatttggttcatgctttaaaaataacataattttagaattgtttaaaaacttagaaaaccccaaataccctactaggaggagaatgaaagaaaagaaacttttagtataagactttaatggctgatgaacacatgaaaacttttaaccaaggaataattaaagggaaattttcagatgttatataatcttaagctatcaaaaggcaaaggtcacattcaatcttgatacaaggcagggaaactggttattcggcaaccaggcatcatctgaccttacgcactgaacaccttaacaatatcaatagcctttgtcccaatgattctcctgctagacttatagataaagacagcaaaataggaatgtgcacggggaattttgtgcaaggatactcagagaagccgcacttatcacagcaaactcgatttatacaacaagatattcattaagtaagatgagctcgtgtggcggaacagtcagtaggctcgtatatatttatttttcagctcttataaaacaggcagatgttcaagaaaaattagctgagactattctgcatgcacagagaaatctgatagtataaaagaagcacacggtcaccctctgtgcccatgggctccagggctccctctacaggtgctccagtcccttgcagaaaatgggacatttttgtagaggaaaggtgcacccctagtgtgctgaaggaagcccagggaaacacctggcagtccctgcctgactgcagcattctgggtgctatgcactttcctccctctccctctccctctccctctccctctccctctccctctccctctcctctctctccctctccctctccctctccctctccctctcccttccctcccccgcctctgcttcatacttagggtctattaaagtcatatgcagaacactgtcttgtaaacagtctcccttctctagtcctccctctgtgtcccactgtgtctctctcagtggttgggagaaggcagctagagggaagtttcctctggtcaccacccttcggcactgactggtactgcacccatgtcaatgtcatccagtcttcttacctcaagggcccaggaccagtagattaaaattaacgaacaggtgctgttgggaggtaggatattagtgaaaataagatccgcacccagcctaggcaggcagggtgagcaggggcaagggcttcatagcagcaggctgatcggcaagaactgcacctatcatcccagctcttgagaagtggaagcatgggcataaaaaaaaaaaaaaaaatgaggccagcctgggctcaaaacaccagaaacaagcacacagacctaaatatctaacatctgtttcttcttgaactcaaacgaagtgtccaaataagtgacttatatagagactttggctttaccaagagaatgctagcaacctaggcgttggtccttattagaaagtcaagcccagctgagagctatttgcttccagagagttcccacagtcccagtggcagagagaaagggaagagggcaaaggaaacacaaacctgagaggtgtttctcccctgcaggaggctgcctgctgagaactagggcagtttctggggcagggcagggctttcccagtgaggtctcctcaatgcttcctcgatattccctgaagcagcagtttgctgacaaagtgctttcagatgcattgtgtgaaggctcccagcggaaggtatcaagggaaacatgaagttctgttcagccagggctttctcacactgttatccatgcctttgagcacctcagaaagagacaaaggaaggagactttctgggccaaagtgctctgttctgtctcctattcagggaactagatgtgtagcgagaagcaggagtgtgttgggaaggggcagatgaggccaaacctcaggcggatttgttttccaccattcttcaggttcactcccctagatgcccaaagacacatgcgagaaccggtgagaagaaaactaagaaggtagcctcaaacattgcccaactgcttgaatgcacccaggtcgattaacacagtggtcccttttatccagtttcagcaccctgtgaccaaccacagcccttaaatagtaaacagaaaattccagtacacaatgtgcaagttttaaattgcatccggttctgagcagcattataaaatctcatgtcatttcccatcattcttcctgggctaggaactgtctcactgtcccgtctgtcccttctctgtatgataaccatgaggcttgtaccattcacttccctttatcattgtgtgggcactgggttatctattgaacatcaccccaagaagggtgaatgcagttcagcaagatactttgagaaagagatcacaatgatgccacttttaattatagtgtactgtaataattatatacatatatatataattatcaattattagtaaacccttactgtgtttaatttataagttaaactgttatagtttatgtgagtataagaagtaaagtaatctatccatagtttcaggctccctcagtgagtactgaaatgtgtacccaataggtaagggggaattactgtgtggagttgtggcaagaaccacaggaaccaactgcgaagagactggtcttcaagagcagcaacatggtgccctcactcataaaacctacagcagttagaaggagcccagaatctcattaaaaaacatttcaaattagggggagaagatgaatcctccctaccagccaactgtccttcctctaacatctttcaaagctgtaggagatgtcttcagccaaaagtttaagccacaccctagcaggcagcatcattcacccagaagttcaagctcttggttaggttgtggcctctccctactccaacatcttgagggtattagtaaaattagtataatttaaattagtataatttaccactcctaccttgaagtatatggacgctgtgactacggagtgagaactaagaagtgtagtaacttattttttttttaacttcgtgaccatgctagttttgactgtttccaaagttcttgagcttcatactcaacaaatgtaaattagagagttggcaggatcagatttttacctatgttgtgtgatcgttatagcaaagtagaatccagtccccaaagcattgaacaaaagatgtggtaacactgaaaaccacattgcatagcaaaattgtaacacttacattttaaatgggatatatagtagctattgtaaaaaaaaatgaaagtggaagaaaaagaaaacccacagaaactgggaagagaaatagaaagtctagcagagcctttggcccaggactggggctagggtggaaggaccaggcttcattcttacacataaaacttaaagaggtgtcaaaaacttagtaagcacatcatctcatgtggtatttagtatgaaattctctgtgaagatacaaccaacactactgcttttttcctttcatctcgagttctcagcctagcatggccataaagatccaagtatatcaagatcagtaaaacggatcttccggtgtgctggatttgtaaatgaagaagaatgcagttgactccctacctcacaccacacacaaaaattcacttagaatgacaaacaactaaatacacaagatgaaattataaaactcttagaaaacatataggatcgaccccttctgatttaggccttggcatggattcttaggtaagacattccaggtgtgagcaacaactaaaaaggtagatcgctgggtttcatcaagagtagaagagtttttgccaaaccggattattagaaaggatataaaagacaccctaaagaatgggaaaagcatctgaaaaccaggcttaatattcagaatctctacagagctcctaaactccacagcagaagacagctttgaaaacagaacagggagcacacttttaatcccagcactcagcaggcagagacatgtggatctctgtgagtacgaggccagcctgatctacagagtgagttccaggacagccatagctgttacacagagaaacgagagagagagagagagagagagagagagagagagagagagagagagagagagcagggatttgaatctgcacttctccaaagaagatattcaagttcccaatgaatacatggaggatgatcaacatccttaattactgtgaaaatgcaaataaaaatcatgatggtatgcaatctcaccccactaggattattctaccctttttaaaagaaaataaatggtgaggcaagggagaaaaaagctacaaggccttcgtgcattgttgggagaaatgaaaaagtgtatggctgtcatggaaaatggcagtacagttcctcaaaaagctacatatgacattgtttgccatggaactgaacaatcccactcagaggtgtatatgcaaatgagagacccaaagagatgcttacctgatggtgttcctaatggctttcttcagcaatggtgccaaaggagaaaccaacccaaatgtccagaaaacagaagaatggataaacaaagcacggcatacacacacacgagagcattcttcaggcataaggagggattaaacacacaccactgcattggcaaaccttaagaacattgtgtcaacatagagaaagaagccagacacaaaaggggcaaatactgcttgactctgcttacacgacaagtccagaactggcaaatcctggacattcgataaataagaggatgaaggtgaaagtgtggatgaagacttgtgctgcttatggctacagagtatctgtttggaatgatgaaggttttggaaacagatagtgatggcagctgtacagcactgaggacataattaatgacactgagctctgcactttacaatgctgaaatcataaattttgtgttatgtacctgatcatgataaatatattcttttaaaataaagaggtctaagtacatgtcatattttgcaaccagatgatagagcatgtgtactctccactgcaattcataaactcttaccatacattaaatcacagagaaaaaatgttacaagataattaagtgagttactaatgaataaaacaactgggcccaaggagattgctccgggagttaaagcgctcagtgcacatgtgtgagaacatcgatctgaatcctcagaacccacagaaaagctggacttggaggcacatctgtaatcccatgatcatagaaagagatggggaacagagccaggaaccttctagaacctctcaggccagatagcctaacaaacacagtgagaactaccaagagagcttatctcaaacaaagtacgtcacaaggactgatagctgaggctgccctcttttctccacacaggcaccagggtacctgcacacacacacatgtacacacacacatgtacacacacacacacacacacacacacacacactggcatgcagacacgcactcacgggcacacacacacacacacacacacacacacactgacacacagacacgcactcaagggcacacacacacacacatacacacacacacacacacacacacacacacacacacacaccacactggcacacagacacgcactcaagggcatacacacacacacacacacacacacacacacacacacacacacactggcatgcagacacgcactcaagggcatacacacacacacacacacacacacacacatgcacactggcatgcactcacgggcacacacaaacttatgcacagacatacacacatgcattgtgcacacacacaaaataatgaatgaatggatcgagacaatattgactgatcataatgcaattaaactagaaatttaaagtaaaacaacaaaaaggctcttcttggatgaacttgtaactgattaaagagaacctgccctaacatgaatgagaccatagagtctgtcccttgcattggggacagaggccctcttcccctggaaatgtttttttttttttcatttttaaaatatggttgatattaagtaaaaaggggaatgccaccaaaatattaataaaacaccatgtatccgaatataaaatacaattgacatggtcttttatatcaatttaaagaatgcattaaatcccaggttctagatgttttggaaaataacactataaaccaaaagaaagtataggaaagaaacaacagaatgcaaacagaaaccagtaaggtagtaaatagaaaaagcagaaaactaattttaaaaatcataatgcttgctttctgtaaaaacaaaaagcctcctttctccagaatatatgatgaccccaacagagtgacttggttgccacaggaaagctcgcccaagcagtcagatgtagcaagaaattgatcaggagtccatgctctatctcaaattttctttcaaacttaatatcctacataatatttcttcggtttttattatttttaataattgctctcctccatgtctctcgggaagatgtgacatattgcaagtttctcagagcctatgtcagtattagcagagagcacatccagctggtataatacctcgggactccttacttttccagtgagattatgtcaattcagccagaggcaccaaaatcaaacggtggcagcagtgggcagctcagcaccttggctcctccccaccaacactgcaccttctggacactgtgctaacttttatgcaaatggtttttatagaaaaggattcagctgagttgttttttgtttgtttgtttattttgtaatgagcataactccttcctccctttagtatcaaaagaataaaaacaatgaattctgccatttcagaatacccaaagcaagagggaaaccccataatctcagatagccagtatgggagggaagcaagttccctcgtccttggaaagccagggatccagaaggagccacacgactgccttcaaagctagccagggaaaacaacttacagatggaaccatgaaatcagcagaaaacaatgaaagaaatgaccacccaaaataccaattgcaggaagcaactgatggcccaaagtggtccagcagagagaaagccatcactctctatccagacacatggcagttgtattttgtattgtactgttggtgtcactcaaagcaaaacacatacccataaagaccatcttgatacatttttttctctctctcagtaataacacagtcaccatggacagacattctttctaggtataataaaaaacagactccatgtatggtaatcccccttgcagtgaacctagtgtaagcagcaagcactgacaatgagcacataagagaacaagcagactctaggatgcatctaggtgcatttccttggtgtaatttgtcaccgaacatatctggctttgtctttcgttatagatctttccctccagcagatacatgtcaaggctattttatatcctcatcaaccagaggttttcaaataatcttcacaacaaaatttcatgatacagcctgatatggaaaactcattataattcccatctctcattatgttgaatgtacagggcttcagactagctatgtgttgagttgcatatgcttccctgtttctagcaattcttccagtgaatggcacgaagcagaaatgtgtgtcaaccagagaagaggtgaatcatgggattgaggtctgaaaagcaaaaggtctcttgacggtggaagccattgctggcacaccataaacaaacatgatacaaaagtcatccaaagccccccgtccctgaaacaatatcattggggaaatgcatttccttttgaaatgggtccaattaagtctctagccttataaatatcgctccttgatttttagaaactcagtttggtttgggttttgttggtggtgttgttgctgttgtgttgctttttgttttcttttcttccactccacagccctccacctgtggaactcacttccatacaacatcaatctgcagggatatagacctcatccagagtgcaatcccggatgctgatggcagctgcggatgctgccaacagctgtggatgccatcccctttctgggagcatggcagacggtctgctgctatgttcattctccttctgaacatacgcactgctgctctggactctcaggcctgaagcagcagtgctgaatcaatcctttggttttgatgatcttgatagcctactgttttgggccccctgcatgttctctactccaggaatgctccggttgcattctgtattgctctaagggtgtaattgctactggatgctacaggctttaagcatcacaaggctagccagatgtgctggcacatgcccataactccaatatttgagaactgtaggcaggaggaccaggagttaaagtaggtaattgaagtctttaaaatagctttggctgtacctggctacaataaaacaaaaacaatctcacaaggttcccaagtctatctaaaggctgccatatcacatatctgggctctaaaggtatgataagtatattttaataattagatagcatgatattattaaaattcaatgtaactatatatacaatataaaactcagtactttaatttgtgactccaagcctacaactaaggtacagctattaaatttcggaccaaactaagaagaactcaaagtgttcttatgacatttacaccaagaaaactccaaaaatctcctccaaccttttgagcaccaaaagttatttagaaagttatttaggaagagcaaaaatcttagctcacagttctagagaccagaaagtcagagatcaagaccagcatgtgataaaatcctgtttgtaccaataaagtgcatctgaagaccagaggagcttgccactagctaacagacaggaagtgagacggctggacagaggaaggactatgggggggcggcaggaactcaccctcttcagccaggaagtcggcgacgtaaggtgtggctgtggcttgctccttcatctctctgatctctcagcatttctccctatatccgactctgggcttttattattaagacgtattagaactccagttacaccagaaagctcaaaactcatgcatggtggcgtcttctacacatccccatggtatactagagggacaggctccctcagggcactttccaaagaggcccagtcctgctactgagggtagtgtcctccaagtctactcacctcctcaaggcctcatgcttgggtactacagcatttggggttaagtgttcaacacaggacaaacaaaaaacccaactgcaccgatttaaccaaagagattaaagccagaatattaaccatgtgatcctcagcactgtcggtctctaatgaccttctacagagaacaactcaagagctgtctaaccgaacagaccacagaacagcagccccgtgagtatgacagcaaggacaccttccagatgcatcctctccacagtgacaagcagccaggcagcgttaaggctgaagcacaagtgacatcggcagagtgtccatcaaccagggcatcaatctagctctgtcctgggagtttatagaattgtggaacatggtctctgtggaagtgggctgaagtaagaaacacagtctccaagtgtgagagacactgtcatttcttccctgagtaacagaacttccttttcccttccagggccccctgcattgtctgtgggaaatccacagtggcaacagcagcaatctgtctatgaaacgagaggggctgggggtgcttgattctctgcaaagtgggagagggcagagccctcaactatatcagatgcctctccagagagatttttttttttttgccatgaaaaactgttcatatgagtttctagacaatagtgtgtttgtggtgtcttttttgtttgtttttcgtttgtttctagtattttttagattaccctcaagtgtagcattacaatttaggctcttcttatttaacctccagagcctccataattaacaaaaaggagaagacattcatggatcaaaatcccccttgggagttaggaatctgtgactacaagcctaaggcttttctcaacccattctttagctaggcacctacatggccattctactttcaaggtcacatgtgatactaaatactcactccctatcctgtgccccctcctgtttacttttcttgagtagcactaaaaaactgaggcaccttctgagcaaacaaggaaacccagtgggtcctcaaacatcactgtgcaaggcagtatgatgaggtcaaggcattgaaatgaacaccgtccactcaaatgaactcagtccctcaaactcacatcacaaagacttttgcaagaagtaatggaggaaggctaatgggattgtgatgctctgagtttggaagttgggaggctctaagattggaagagtgggcctctgggaagacagtggagtagcagcagaggtgggggcacaggctgggcgtcacctgttgtgatttgactatgatccccaagtcgaggtattggagactcaatccatggcaatagtgattggggcatcagtgctctgccgcagtaaatagactaacactgttattgcaggaatgagttgtgggttagctgggttcctgctaacaggagtatctagtccccttctgcttgctcccagaccagcccaaatgatgctgctgacatgctgtgatgcagagatgcgtgaggtcttccccagatgtgggctctggacctgagacttacaggcccagatctattagaagcaagtgtcttcattataaattattcttggtatttattatagcagcactaagatccaagctctgtggcaacagagaaaacactgaaggacagacagacaccagtgggcaaggctttccggcagtcttctggaggaatctttcagaagaaactaggcttatgatttcacttggtattatggaaaatttcaaataacacgaaaactgaagtgtctaatgcaggtgcctccagcctcagcagtcacacgtccatgacaggtctgattctgagttctcaccacttctattgctatgattgcaaagcaatccctttgttcatagtgtctaatctgtcagaactttagtacccaactctaaagggcaagagcactttaaaaagactcttagttccattattaccaagaaacatcttaatatgataaacctctttaatttgttacacagacttcatccaggctggagacaccacccgcattccatccaccagcctaaagaagacagatatccattctcgtctctgctaagccacaacattaaaaccgtatcacacacgtggtttctagagtcctgcatgttgttggaggagacaatatgcaataagcaaaggataggctacaccctgctggaaacgtgctgcttgcattctgctgggacccaggccccagaacaaagtggacattaaaataaaaaaaggaaccaggcgagatctgctttcacttaaaatgcttctgtgggttcacacactacagagttctgcagcatgccgctcctcgctttgaagaaaggtgcacatggaccctggaatctgcagccctccccccacagcgtggctcacatcggaaggctctctgtcctgggcaagccctcacttttcacttccctttctggtttcccacttcataacggaacacggaagttcacccaaagacgagttgcttccattttcaacaagtgcgcgtcggctttgtcctgtaataccgtgggatgggaaatcacccgatgcccttctgcatgctgatgtggcttgaaggtgactcagtagctgagacccctgatgaaaaacagcaccccacgaatccaggagaaccaacactctttctgtggaaagacatggtgtgttcggtgggattcccaggttgttggttagcaggcatcgtgctggcctgctctcctgccagccttgccaaggactggggtgggggtgggggtgatggtgctatggctcagcccagatcctgcattccccttgtgatgcttttgcttcctacctatcttctgcaaaggctgccctgggatgcagattaaaactgtggattaggcttcagcggggagtcactgtcacctactgtgttccaggcagggggtggttcagctcatgcttcctctcaactgcgagcttgccattctcagcactataaaaacaacagttccgtggagaactgttcggccttggagctggaattatgaccacctcctcatcacagcagccatagagcttaacagccagggagagagcagccccccatgtgtggccccaggtctgagggctccccagcaggataaggctggagccaaaggcagactttgtcataactgtctcaaactttggcttccttttcttctttatttttttttctgcctccttcatgctctcacacattccctgggaaccacattcttattgaacaggaatcctcacttctagacatatgtctggggaacccaacgacaaccagcacatgcctaggactcccagccagtgtgtccagtattcaaagaaaatattatctcttctcaacacatctacgcagggatgcccagggaggataagcaaatgcagaattatttaccatataccctccatcttgctgcacgatgacacaggagaaagcccatcacgtttgtgactaacctgccacagccaacagtgtggccaagccgtgtcctttaaccagcctagggctctctgttctccacagaaggtgaaaatggcgaccccacagttgagaagacacatgagctaaactactccctgcctggcacacagcaggtgacagtggctgcccgctgaatcttaatctgcatttttatgataatgccctttcagtcagaagtgaccccaaacccatcaaaggagccagatgcctctgcagtcctgctcttccccctgcagcgatggcccgggcctgtggattcctcgaactactagggacaggaaccagatgctatcataactgcatggaaaaaaaatggtccctcaccaagaaaaaaaggcccttgacggacgttactggggctttatgagccatcaagagcaacagctgcatagaaggctcccacccagcaattgttaagcagcaggcggtattttattatcctttcccctctgtttaatgtgttgttcaccttctgctgggatggttagccttgattatcaatctcaacataaaaatataggaatgtcctactcctgttcctctcggaagtctctctgttgctcgttactgttagaatcacacactcgttagctgagtggactggaacctttggtcccagggagctggtagatgattgtgggtgggggggggggagcaagaaaggagaagtatgtctggatgctcacagagtatcgggaaaactacaggatcacatcaaacaaggcgccagcaacagacaaagaagctgtggctgaggtgcacacatctggggaaagagggttttgtttgtttgtttattttttgttgctgttgctatttgtttgtttgttttctcaattacatccttctatttgttccccaacacagaccttgtgtgcctgtgctgagggggcaccaggcttcctgtcccttagcttcccaacacgaagtcagcattccctgccccttggccctcttgcggcagtggggttaccccgctgtcttgttctccagactctgagcaggcagatggctggagtctgcccacgttgctgtcccggagcagcacttggaagccattgagcaactgccagactttatctgtcttccttggaataacttcgttgacttttattgtcctgtctcgccccctttggggcatgaaacagtgcaggtgctgtgggagctgccggacatagccatactgacaatcatccctgaatccaccagcctgtccaccaccctgtctcctgagaggattcaacatgaatgtgacaagcccaagggctttctcaatctttgtctgctcttagccagcttcaagcatttacctcaagggatttgtcacttgagaaaaatgcccaggataatgtacccgttttaaacgttatagaagatgttaggaccaagcaaggattgccatcctattggaccagagtcccggggcacttagctgagaagtcactctcttcctaagacaccaagtcacactgtgaccattcatggactctgctaggaactctctcccaaatgcccctctctttgtccagtagcagcctatcagcctgtaaattccactggacctacacatttatattcgcagttcatactccatcttaaggtgtggaatactgcttgctttttgttttttccccaatgcagtttctcctgggcttaagagataaacccaagatttactggataatctatccaactgtcaaatgaggtgctctgttccctcctagattctatcatccacactgaagaattaatttaactgtctcttctccaactcctctacctagtgtctacaaaaaccatagctctcacctcaatggaaatgagatagtgttttcctgaaccaaatatgaggaaccatagcctaagaacacagcctaaataacaagctccaacatggacatggtttcatgaagttttgtttgtttatttggggtgggttctatgttttgtttgttttgttttgtttgcttgcttgcttgtttttgagacaaggtttctctgtgtaacagttctggctgtcctggagctctttgtagaccgggctggccttgaactcccagagataacacctgcctctgcctcccaagtgctgggattaaaggtgtgtaccaccactctgctcatgaagtttttaaagttatagaacaaagagtcacaaatcaaggtgttttccaaatgcattggtgggaatctgaggtcagcagataatggaaaagcagagacttcactggcacagatctcagatgctgtctcagcttctgagttggtggaagtggaagccagcggtccacaaagtcaatgcattccatagggttatttgttgttgctgttgttgttttgttttgttttgttttgttttgcctgctaaccctgaaaggatgtcagacacaggggaagaggataaatggccgctaaggggactaaagacagcgtaagataacgtggctctccatccaaacaccccaaggctccatagtcaccaagttctaatcagccacatctcttgtagagttctttctattcacactccttattggcttttacttcctttgtattttagttattttccagtattgctgcatgaacctcagccatgctaggcacatgctcagccactaagcagaactcagagcccactccagtttacatgttaagatgaccttttccatgataagatctttgtcttagttacttggcaattgctgtggcaaaacaccatgaccaaggcaactcataaagaatttttgtgggggggggcactcacagttccagagaatgactccatgaccgtcatagtggggagcatggcagccagcaggcatggtgctggaacaggagcagtagctgagagcataaatctgatcgataaccacaaccaagagatagctggttgggaatgatatgagcttttaaaacctcaaagcccatccagtggcatgcttcctccaacaaggtcacacctcctaatccctctcaaatggtgccatcaaccagggaccaagtattcagtggggtcattctcattcaaatcactacaatcttctaggttcaaattttatattgtgtgagggcaagaggatacttttttttaaactttgttttcaatacttcatgataatgttcaacaaatcttgctgatcttaactgttgagtgaaatgacagtgattcagtctttagttcatctcctcagctaagaagtgtctcagggaaaaatcacctcaaaaaattggttggagaccagggaaatgcttggtaagtaaagtgctcgcccaagaattcccagaacccagttataaagacaggctaagtagtacaagtttcaggccagtgagaggccttgtctcaagcaacagtggaaggttcccaagaataaacacctgaggttatccactgactcccacatgtatctacattcataaggctaccccacaaatgtatgcactgtctatacccagacacacacacacacaattattttactttaactgtttctcttctctcatgaaattccctttgctcatttctcccagactattcaaccttgattttttttttatttcctggaagaatataactccaaatttggaaaaatttcccttcattgtttcttatctatcctttggggaaaagtgtttaattgggtcaattccatgtcttccttgggattttattactcacactttccttcctaaggaaattaccatttatcccaaatctttgttcaccctaacacaatttttctacctcctcaaatacttttgcattgtgtatgtgtgtgtgtgtgtgtgtgtgtgtgtgtgtgtgtgtgtgtgtgtgcgcgcgcgcgcgcgcgcgctctcatctgcctgcatgtgtgtttgcccatgatagtagatgtgcggaccagaggttgatgccagttttactccctctatggctcttcaccttattttatgagacagggactctcactaaacccagagctcactgctttggctagattggctgtctgggagtccctgggacctacctatagcttctccctagcactgaggttacaaaagtaggctaccatatgctttatgtcattaaatcagtttatattgtttataattctataacaaaatcacataatatgaaatcttctggttttggacgggagtctggcttgttttactcaccataattattctgagatccatgcatattatcatatgtagcaacagtctgagtacttgaagggtattctgttgtataaaacatttcacattttgcttattaatttatctgttggagaacatctgcacatcttctaggttttgtgacttattctgctatcaacatccatgtacaagtcttagtgtgaacatacactctcttgcctctctagtcagtgcctactggtggcatggtggtaaaatccaatcatattgctcctgccaaaatgtacttaaagggcttactggaaatctaaaccatatcctccccattttgcatcttttcttttccaaaaaatcaatatagttctgaaaggatgagatgaaaaggtaaaagtgaagttatgtctctctcctttggaccatctcagtctccctaagaacccagcacagttggccagggtgatggagaatcccttaagtgggggaggaaacagaggttcctcaggctcagctctggtacacagatgctaaaaacatccaagaagtcaatcaaagtcccaccaccagcccacctggagcatagcatcttcaaacatggagcatagcatctgcaaacatggaacacagcatctgaaaacacggaggatgcaaacatggcttaggactgaatagagcgtgaaggcgttgttccctgtgctttgtttctgctgctcttagcctggttttaaatttcatataaagctccaaaaaatggagagggacaaaggagtcataaaagaggaaggaggagggagagggggagggatggagagagagagagattaaattcttggagtctatgcttcctataatgactttgcttaccttgcattactttttaaagcaaaggtcaaaagacctggagtgaatggttgcttggatttcagggctgtgagcaaagagcatgtttaggcggtcaccctcaatgcctcttttgtgaagggggtgcatcacagaattaacgactggtgattttgaagctccaggtgtaaaggaaatactcttgttatttttaatttacgagctcctgtagcaatacactcatcaggatcccctccagatgtgtaaagaaataccaacgatgcttaaaattactgcagctggaagagccctttgcttcctgctcccaccctcaaccacgtagccccataaatcagcactcctcacgtgcctatgttgaacggaaacagagaacatgcaaagtaataaatccgcagcaggtatccgaggctgtggttggccatcagaacggcaggaagattcatggtatctagtcttatgctctctggctttgctataaaagctaaaaccaaatgtccagcatcgcgaggaatgtgatgcgatgggggtggtccaactcactcaaaaggcttgagggttgggctcactgtgtcaaggcaagggtatgagaaacggggtatagaaggccagctgagaagagtgggtatgggacaaatcccatctgagggccagcaggtgacacctcaacagccaggagtgacctctacaggcctcaagaggggagtgacagaccccacagaatgctgggtgttttcatcagaaacttgggactgactctaggtaggacaatcagtattatgcagcaactgggcagggcatccgctgtcaccgaaaggcccagccctgcaggtttattttgctgtcgttgtggtggtggacatacaagactttaccctggtcggccaggactttaccacagagccacagcccaacctccctaataggcagtagtattttgctgtgctggggatagagcccaggcaagctctctatcactaagtcacacccagccctgcagcatggagtgccggctcctgcaactacagacattcaccataactccacagaggaaagcctggggtggacaggcacttctctgaacctgctgccagacatccatgctcccaagtgagatggtccttcttcctggcactgctgccaatcagagggactgtgtcatcatttgaaggaaccagcactggccaccctgcaggctcaagaaggagatagcacaacttctggctgagagtgtaggtagtcttaagtgggcacagaagacaaagaaaggagcccaccataaggacacagttgggcaggaagagtaagttttaaagaagcgggtctagaagaaaggcctacagtcttgggtacggcagccacggcacagcaagggaggtgatgtgctccacagtgcccaagagacactgcttctgaactgaaggctggacttctccagcaagcaggggaggaagctggcgatctctatacaccacagttatcccaagatgcagtccccagaagctgtttgtggtagccaggagctcaggcttttcactgaaactgggtcatgtaaagatggaatgagttacacattcacctctctccatggatggtacattcaggaaagggattcgggcatcagactagtaagcaaatgaaggagaagactttctgacaatagtgaatgctgggaacacacctttcacatctaaccacctaagcctccagtgaggcaataccagatgttttggtgaactctgccctgaacgtgtgtgttgtatctaactgtcctcgatggactgagatctccatgatggaattggctgtcctaattctattgtagtgtcctaagtatctagtgcagtatagtgtggactaccaatgatggatgatggatggatggatggatggatggatggatggatggatggatggatgtgtgtgtgtgggtagacagatgatatatacttccaggatcttatatggggttcccttgcaagcatccctcgaattgacaactgggttgaggctgggactttaaacaccaggtgttccgagtacaggcagggcagttgagttttctttcaaccctggacaataactctaaaattctgtgtaaccaggtttcagtctgttttgtaaccatctgttttctcccacaaatgctacctcagcacttcaggttgggcaccagaaagacagctataataaagcatggaaatctatttgagaaaaatgaaccacattttttttcctgaagtgtctaaaacactggaaatagattctgagtgatggtttatatttcatcactttctttttatccacaggggcttgccgtgtgttgattatctcctttttcactgcaggccccgggacaattcctttcattgtccctgccaagcccttttctttccttcactgggctttaaaaggacaaaccattgcctgagaaggctttggttctggaagatgccaagaaaatgacataggccattatttctaggctcacaaaaatcttcttccccaaatttcagtgtgcttcctgaacaaacaggtcgggtaccagggggaaaaagcatcatcatccaatctgacatcccacccactcccattggttaaaggaaatggtgggcaattatcagaagtagccactgctgagtctaaccatgtggaaaccaacaatgaaaattttcccacgtgcttatccatctgaatcacctctatcaatagcgctaatcttctggccccacaataaattatcttacaagcaccaccccacagtttcttttgcgtattctattcttcggagaaataagacagacctgcgttttcaagcccacgtgattcattcttttgacatttgttctccgagtgtcagtcatgggagcacagtcctgggggtgtggaagcgaggctacccatctggtctcacgagcacaggcagaagtagcagaaacgtccaccagagtcatgagccggaagaaacagaaggcagaaaatacaaacgtcatcccagaagaggaagcagagacaccaagcagatctctgtgtgactccccgtgacctgtctcaggccaaaccatcatggccgtgtcccttagtttgttcttttcctacttcctgggtaaggcacagacagagagcgccctggatggatctgtttccctcaacaacgtcattcatcagcccgctcagcctccacccagcgctgcacggtgtaatacatctttagtttctctaatgtcttccctatgattctatccccaaatgctttacatacttcactaagacagctttagaattaaaataatcaatcagagcgagcaagcaacagaaagcagggaggctcactgaaggaagaagatggagagccctgatcagctgtgctcctcaggtgactaagaagtcctcctccccggtgactcttccactggtttaatgtcccaggctgcatcccctctctgttcctttacaatgcctcctcttggaaacaaagttaggtaactgagctgtttaggttcctggcatgacttttcataccgggagaggatgcactttcctcaaagcgccctagagtggtacagttcacctcttgagcacacagcgcagcaacttgtcagcatttcaacagagaaaaacttggagatttgaactcagttcctcctgactgcacagcaagtactgtacaaactgagctacctcccagctctgacgtccattctttatgttgttgttgccattttcacattggctctccaacccatctcaacaaacttggtctttggaggcagaacatcatggtggcagagaacagtcaatgattcagtcaacaaccgtttcttggggcttcagccatgaacagagacaactgtctctgccttttggagctgacattctggatctctggctctggacttactccttacacaccagcacatttccctcatcattctgtactttagtttccatgtctgtgatggtgcgataacagggtgaactcggggacacttttgaagctaaaagtatgacgatgaggatggtgtgttgagcttgggaatgcctcagaccatggaagctgctatgctttccaaatgggtaaatacagacaagaggaaaccagttgcgagcatgctgtagcagggcggtagcagaggtgcgccgtctctctcgtccccctttttctctgtacttgaccctggcttccactccttttcagcatactgtacgtcacccccaaattcaaatcataagcaaaagagtatcttcaatttttcactttgatttaatttaatgctttggttgatttacaaggtcaatgtcatgacaatttggacttgtggcatttgtggcatgactcaccactgcgctctagggtaacagaattcttttttccacagtcatgtagcccagcctggccttgaacttgaaatgtaggttggccttgaacttttgatcccctcctcccacttctatctagtgacagaattctttattgctcctcctctttttctcctttcctttattagagaccaacttgtctggactgtaaagtcaagagctgggggctagggacacaatccagtcagtaaagtacttgccttgcatgcagaaagggtgacctgagttctgtgactcagaacccatgtgtgaaagtcagcaacggtggtactcagttgtaatcccagtgctagggaagtggataacaggcacataaaacctaagaaataaaacaccttcaaagccagatgtgatgatggatgcttgtaatggatacatttgggaagtaaaggtaggaggatcctaagttcaacaccagcctgaactacatagtaagttcaaagtcaacctgctcttcagagtaagaccctgactcaatgaacagatgaagcaagcaagcaagcaaacacatcctcaaatatcaagaattatgtagtagactaactaaaaccacaagagcatggcctcaaggctgcccttctctccttccagtctttggagacctcattaccaaaggactccatctccctatgggtttttaagagctgttggtctgcactccctgtataggtggcttcctttctgaggcttgaagccagatctttgcaatagctattgagtcttgggtagctatcaggcaggattacgagggccagacaaagtcaggtaccatgtgagtgtctacatggggggttcactgagtttcccacccaggacagggctctatccttctgtagcaggttctgtgttaatatcatctctaagactcagatgatcacatgctatcttaaccttcactatgacactgtgaagtagacaggatgatatccaggaacaagagaaaatcaaagattggagaggtcaagttaactgtctagtttggggcttggggttaagccttgagctggaccattttcccatttgcactgctcagggtctttctcaggctatcaccaacaccagtaaaaagacaatcaaaacacagatgcagaaagcagtttaaaaggatcccagggatgctatgggttcactgacactttgccctcaaacattagcacaaggcatggccagggattttttccaaacggtccctagatattgtgagatgacagaaaacacctcagcaagatgatgttagacatgatccctgtttggggctggggggcgatgcacacagtacatgctctccatagcaggagatggtgcagggtgcagggtctcacactggtatgtaccaaacaggtaccacttctgctctgctcaatacaaacagtctagatggatgtctgggatggcacattagggcatcagatcctccaagactagagttacagacaattgtaagactcaaatgcaggttctctaatagagcaacaagtgctcttagatgctgatccaaactccccagcccttcagattccctctaacaaacacaggctccacagtgtaggcactaaattcagccatttgtttgcattgcttttgccatgtctcaggcaatcatgaggtatttcttcatgcaacttacacctgatactgtttcctggggcctcggaaatccaaaggcaccaaagactcacttggctccttcttaatgtcttcctttcacactgccactgaggtgagttttaagtgaaactatatttatacaactacaactcctaaaagttcacatcatccatattcatgagcaacagttctttcttttccaagaagtgctcagaaccttttctaagaagagtaaggctaagcctgccaggagtgcattagccagagatcctgagggtgatagtttggcctggctctgcttagctgctgaggaagggggcaggaaagcttggagcacctggaacccaggccactccggcaggtggttagggaaaagatgcccctatcggaaccctgcaggagcctccacaggagccagtagtgtttgggccccacttaaggcccattcacaattgggtgccctgttccatgtacaagtgacacaactgtgcacattggccctcaccagtgtcccataggaagtgccacagtggtcctgcttccacgggaagctgtggaatccgcagagtcagaatggaggaagggctagtgtgatgggagagggggagaggacagtctatcgaatgagacctgcaagagttaggaggctatgcaaacacaagaaactgaaaaaacaaaacaaaacaaaaaaacagagaatttctacagaatgagctcctgaaggttctgacacagctcttgttatgtggttttagattttgggtgatttaaaaaaaaaatctgttgaggtagaattctaatcataaacacagtcctagaaattagctgtcccagtcagtaaagccagaggcagaaacgaaactccgtctctacactgtaagtcagcaagcaagagacgaatcttgtgtgtacctggctccatttttctcctcctgcatctcctgagaccaattgtgttcaggtggtcttttccagtaatggttgttgatgtgtttcgcaagtgtccccgcagggaactgtatttgatagaggacaaggggaccgactatgggcagtcctgtgatcctcctcatccctcttggacttaataaactcagagcacacaaccaagtgccactattttgtgtaaagtacctagggatggaagggagcctcttctagccaagatcacacatgcaaagcccttgctggcgccagtgcaagccaggatctgtttgtatttgtctagatgtaatagcaataagaacggggacagtcataactatagctgcatgtgcgtatgtggcattaggactggggcctgaccagagggaaacatggccctgacaactgtgttagctctcaaagtcggcccctacaacagcttacccttgaccctgggacctgcttttaatacaatgggaatctccagcccaggagctactgttccaatcagtcatatgacagtcagggatatggtcaagagacttggcgataactgtcaggcagtcaaggagccacttaaagacaaagatggaaggaattacgggagggtttgacggatgccagcatagcaacatccctcaggaaaagaacaagtttggatcaaagacaaaaggtgagaaaagtggtgacgtgtatcgtgacactatgatctgcccctgcagggagctgatgagaggagaacgaggggcatgacagtaacttcatgaaaggacaggacaatatggcagttgagaaggcagagcacatggatgctacaaaatgaacataagatgccttggttattgtcatcattgtgatcaaaatccttgctataaacaattcgagggagacgggatttatcttagctcacatttcagaaggctcagtccatggagattttgccccatactcttgacagaacatgacagtggcaatgtgtggctgactttcaattactggtaaacaggaagcacagagaggagggaaatacaggaaggaggccagatggcttacagcctgcaaggacatgtccacagcgccaactttttccaactaagtctcacctcctacccttccccacataacatcatcttgttatctgtgaatacactgagacctcgactgatccacccactgatgtcccaatggctttgtcctcttgcctctggaaatttctcccagacatgtccaggggtgagttttactgatatactattcacttcacaattcaatggagttggcaatcaggattagccatcacagggggcatctctatattgaacactagagtttatctagaatattcaaacttagggcaaacatattttaaatcaacagaaaaaaaaaatactgtgactggatctccaaatggtaagtctttaagtataagaagagggtcacaggaggagggacagagacacaagggaaaaaacacaattgtttatggttctttggattatttgggaatgaaactcaatatgaagacatgaggtcatctgaaggattcggtttcttttccaaggtttgaggaaattccatgcatgatacaggatctgctcattgtttttcaaataacagtgaaatttccactgcctcaaccccaacgacagggttcccctccattgggttttgtgtactttaaatgacagaaagcaaaggacataattagtgaacagtcaacacatggggaaatttaaccatatcctacctacatcatcatttcttctcagtgatgtaaaacggatgctaacagtcacaatttgaaatggcctttgtgctcaataccaatatatgactgaccaatctgaggacagacctacccatttcttctttacatgggccgaagtcactttaagacctttttctctgaggcagagtggctgacctctaactcaccatgcattcaaggatgaccttcaacttttacacctcctgtctgctgagagtacaggtatgcaccccattgccctgtctacgcagtgctgaagatccaggtcagggcttcacatatgctgagcaaaaccctctccaccaaacaacactcatagcctgaactgctactatttttaaagtttctttccccccaagaacagtggactaaaattctgaattacagaattattagctaaagaaaggatttttttttttaattcttagattcaacaaatgcaatgatttgaatgtgtcacctccaaaactcacattggagctggatccccactgtcctggtcttttgaggctgggccttcagaaggccactagaccatggcagctcagaagcaactttgtctctcttgcccttctatcttctgcttcatgaggacagaacagcaagacgccatgttggaaacagacagcaacccttacgtaaacactggtaccctgatcttggacttcccagtctctataacagaaagaaataacctcttgttccttataaatctccccatcttgaacatcggtgttaaaggaacaagagcagcaggaacaagacaatgggccctgagttactgtgatcttgctacagaaatttataaatccttcttcatggacttctggaaatccaaatatgtgatagatccctggttctgtctcttgacactgcggatcctggatgaatctctctatctgctataggtgcctgttcatgacaggcaggttgttcacatgctgcctagcttacggaagggaggaagacccagtgacaagctggggtgatgggtaagggatgagggaaagtgtgtgcatgggctttttgcatggcactctgcccctctgtacactttgaagacaagctcacaccatcaagctccagctgctgctatcaatgttcacgacaaagaagatacaaaggggccggaaggaggactcagcactcatgccaccaaccctcatgacctagctcagtccccaaaccaggatggtgcaagaaatgaaccaactcccctgagttatcctctgatctacacatacatgcatatgggggtgcacacacccatatagatagatggatggatggatgatagatggatagacagacagacagacagacagacagacagacagatagatgattgatagatgatagacagacagatagatagataatagataaacagacagacagacagacagacagacagatggatacatagatagatagacagatggaaagacaggtaagtaaataataaagtgaagagtgtgtgtgctaagggataggcaaccccctcgatctttcccacctctatgaaagctcagccctgaaattcctaaagttctgaagagacaacttttggggtccccactcactgctggcatcctctgcagagcctcctaccatcattaccaacctattgatctcagggcccggcacctgttctctctaaacggaacccaccgaggaccccagtcccttaagtcttcccaagtcaaacctttcttaggtgttttgttttgtaagtctggcacatttgtgtggaatcctccaaagcactgaattttcatactcaaagagcctccagttagaatgtgaaaggtcagctccaaagagcactgaagacgtgctccctccagcatagagaccaggtagccacccgcaacagctttctcctccctcactgacaggcgcctcactctctaagtgatatgcgaattgtcctccttggcaagttctccttcatccccaaagagctatgagacagcttcctcccattcttaggtttcactcagcctttgctcacacacacaggtactccacagagtcatcaaaatggccttttacccagtgacccaaaagatttctacctgcagtgacttctcactcctttgccaatgttcacccacctgtggctacactccgataggtttcttgtgtctcgggatcatctagctcatgtcctcctaaaaccttacatttcttcattcctgctctgcatggcagggatgtaacatcccagtgagcctgggttctctgctcagtgatccagacatcactgagagtcacacacaggtggagctaaccatggtccttgctaggtgaccagcatacatgtatgttctgtcactttccccatatccaagccagtccaaatgttcagaggagaataaacatggcaccttgataccgtgagtccctcaaagctggccccccaacaagccctccctgccacctagtatggatgatatctctatccaggacactggtcctcttgtcctctcctaacttgtcccttcctcagtcagagccccttccttatatttgtgacctgaatgccactattcctagacttaaggaaagtcccatggtgtattgtacaggcccacatgaaattaaacttttgtgatattcttaataacttaacatcaccaaattttaatcttcaaactagacatcatccccattttatagatgtggaaactgaggcacttaagccctctgactccatatccagtactatttattccagatcctgtttattctggagcctgagaatcttagagaaagttttctaaggtttagctccaagtatcaagtaaagaatgagttaggaagagtggagcagaggtcccaaccatctgctatttctgtctctgctatgaattaactcagacgaaccttcctggtccccagttcccttgttcataaaatcacaggattgaattagccaaccctgctgtcccactcagctgtcctttgtctccagccctgtctctgccttgctgctaaaattaggcagacaacatagttcaaatacctttcaatttgggttcttgtggctttaaacaccctatgattagctatctatccaatgtttgattggttatatgtgcagctagtgtgtcaagagggaatccacctgccatctctttaatagtctctttttggcaggttcatgagcagataagtctggggtcactggccacaggtctgtacctatgacatccataccccaaagaagaccgtctttagagccatacactctcatggtagtggttctcaacctagggcacatctgactattccagaacatagtagggagaaaggtacagtggcttgcaggaaacagaggccaaagacgctgcagagaacaccataatgcagaggccagttctctcaacacagagttgtctgactcacaatgtcaacagtgccccgttgagaaaccttgccttcaaatgccaactcaaatgacagtcctaatgccatctgacactttcaactgagtccatacaagaggtcaccagccaggtgtatccaaaagaaccaaaggtctgagcatctcttaccgtgcaaagaaggaagcagccaccgaggtacctgtggaagtctcactggccacacacgaggcctgtgaggcagggacactgctggctgcaggcttgtctgcattgtagcggttcagtgccgattcggtcagtccctctctgcccgtctctgtcatcagctgggagatctgacaaagaaaatgacatggagctcattacctggggctcacagaatttctgcccattgccagcggctatctgtctggaaaatggggtgggtttaattccacccacactcttaacctggggtacacagggtttccgtgaccatttcccagcatgttagctaggtcacttccttgtttccatttaaaataatggtgtaaaataacctcaacattgtgggttgcattacacctactttccctttcaggggtggggaaagtgtcactcattagccacatgctcttcgaaggccaggatcttaactgtgacatgaactgatgctagcttggtaccaggaaggccccaagtgctcacaaagtgggggaactggcagaggttcagcagatgaaggcatgagcaagcctgcttgaacccagtgattcagataaaggggtctcaggagcagtggttggggtcagctgggagaagacaggtggattacagacacagataaaattagaaacagctaccaagaattgccagtggtttttcatggagggtttaggacattttgacttccctttccttggatccattaacaggaccatgaatgatttctgctttgtttctttttgttctttgtttttgtttttgagacaggatttcttacagcccaggctgcctagaactaggtatgtagccaggactagccttgaactcttcaagcttccatttccacttcccaagtgccgggattacaggaatgtaccaccatatctggctaaagtcttagtaaggtgtgatggttgattttaaccgtcaacttgataccatctgtggcctggatcaggttggggtggggggctttttcttagttgggttagctgacattgagagaccaaccctgaatgtgggtgacatttcataggctgggccctgaactgtataaaagtgaaaaaacgtgaacagagcaagtagacatgcaatgcggccattgctctgctccatctgggggtatgatgtgactagctgtgtcggatcctggctcctttcacttctctgctacggtggattgtaacctggaattgttggggagcggataaaccctcccttccttgacttactttttgtcgggaaattttatcacagcaacagaaataagactagaacatactgtgtctttgttttgtttgtttgagaataggtatcttgcagcatagactgcccttcaacttcctaggtagcagagacttttttcattttatttccagtggttgcttttgttatctcccacagtctgctagaaagacccacacttctggggaaaataaggatatggtatggaaacacacttatgtccatcttacatgatacggtgatcgtggggtaaaactctaagtgtgctaggtgattactttaaagttttaacctgcttccaaagggggaaacattggtttaaataaacaaatgaaaacagggataacttcagctaaacaaaaaggtctttggtctgccacaacccttaaatactaaatggaaaatattcccatcacttataaaacacaggtgtaagaaagcccagggcaggaaccttttcctttggtcgctgagccgggtggccggccatgacagagcctgggttaacagcaggcatgaaaccattcatacttctccgtatcagcagaagagccattactctactgcccattgaaagggaacttcaatgggaaacttcgctctgcttaaattcctgctctaaattgggtgtttggcattattcggtgggaatcttgccaaccctcactttcttactctcattcttcacacaagaaagaaatgtgaccccaatgagagcatctggagaggcggcagcagagagaaggcccggaggatgctatccccgtaatctacagggttcctaactcccataggcataggtcacctctttgggcttcctatgctaccaagagctgccacatcccagaggggacaataaggagagtgccatgcacacacactgttgtcctcactggctagtaatgataatgccacaggaggtacacgatgctctcctggacaacatccaggaacaaaaccaaactcgcaaacccacggcatcttgctcccatctggttttcacttacaatgacatctgagaaaagtcagcacgcgaatgaggtggggtcactgagcagttctcacccaatcctctgtggacgtttcctttcccatctttatatttctttttaatgtatcttgggtctttttttatttttaaagagtgcttccattttcccttcagtatctacactttgggtgatactctgtaagttacacatcatggaataatggatcaggactgccttgtccactctataccaaggtcaagagaacagcacacagggataacaaaagcacatttgtggaatggatcttgcttttattttctactgctcatatctacctgattaaatcttctttcctacagtcctttaaataagcaaatggatttctttcccaggtttcattattttgctaggcatgtcctcattaatgctgggcaggcagtataccactgagaacactctagtccttccttttcagttcagttgttcttggtgcttagctgtaccgggcacttcggtaggcacttttgcaaacatgtctttgtgtctcagatgtcttcaatatttacttcaatatttaccctctttgcaatttgtacatgagcccctggctggcagtatgttgtacaaagacagtgcacaggatagctggctgaattcaacttctgggctttgtccagctacattttatcactcaaagtcagaggagccaggcgccctcttagaagtggacatcactgttaaaactcagcaattaaaatcatattgtttccagatgtttttggaaagaggagcctgctaatcagatgagctaccattcatcgaccctgtattgcagtgcaggcttctgaacgctggggcatgttggacaagtggacacagtggacaagtctcaccaaggggctatcaaggacttactctcttcacccttgacgattatcactgagatagtcccaccagccatgaatgaatttgtcaaagggacaaatacttgcctgctggataagagagagttaagaaagatctgaccaaggcaaattccttctttggcttccaactggagatagcccatcccaaagctgtacgcacattaagcagaaaggttcaagataccaaaggcatcaccatatctgctagtcctctaagattggtaagtccgatctcttctccaaggctcatgggagatggacaacaaaagttacgtagacagcttggctcttgctcccagttcacagataaggagagagtttcggagaagacatatgacctcttcaaggtcacacagcaaaatggaaatgcaggccctgcctgacgtcattctgtattccttcctcagaccatctgttaccaaagtgtattgaacaaactggagaccaggtaggatttgggaggttatagaaagtaaactgtgctaagttcctcacttcatgaaatgggggaagggcaggggagaatcaaaccagaaaactaaacatagactacatcagtgtagttttttttgtttttgtttgtttggttttttttgtttttttttttttttttgcgcgtgcgcacacgtgtgtgtgtgtgttgtgtgtgtgtgtgtgtgtgtgttgtgtgtgtgtgtgtgtgtgtgtgtgtgtgtgtgtgtgtgtgtgtgtgagagagagagagagagagagagagagagagagagagagagacggtcctcaatatagcctgagctactatggcccctacctctgtccagcacccctgtctctggcttgtaggtcaggtgcaggtggtggggggcacacatgaagggcagtagttggtgactacaagccctcgctacagtcctgacccccagctctgcccctcccccagctccatcctctctgtactgtctcatccttgaggaacctcctgatgctttagtattgccacccagttcctaaccagaaacttgatttgaaggtctccatgtgccttggttgtgcagactgttagacattttcttctcttgacatactctggaaaatacacacttattcctgagaaaactcagatccaaagacacaaagcgtccgtttcccacctgtaatctagtagaaaggcttccctgtctgtatcattgttcctattataaacgaagctcaaggccacttccaataacaaactcaggtggaccaagttttcaccacagggtcatgtttggattggttcttattaaaacccacatttagaccacgtcactgcttaacagcatctgtccacttttcaaacactaccattttccatgaggagaagaggatggtggaagtgagacagggcgacggtgaaaggaacgtgactgtgaggagtgtgaggagagggggtgtgtgtgcacactgtgggcggatccttcatggtcctccacacaccatccatgtgccatgatgtgctgtagggttgctttgcacaggctacatacaaacgtcacccccgccatgttaaccagagggtaggcacatgtctttaagtcatactgaaattttgacacctcagcaccaagcactctgtacatgtccccaaagacaccaagactctcaaatttgcttatggcttgagcacagaatcagaacaaagggtgttgtaacctttcttccacactacaagctgcaatctataggccactggccttaacttttcccactgaaagaatagctcagagctatcagtgggtgtcagcatggggtttatcttagatgacattcttgacccagaaagccaccttcctttgactgtgccacggcagcagggggctccaaacagcatctattccctaagtggagacatttgcagacaccaattgcttcctattcagtcttcagttaactacatttaatgacacagtaacattctctcaagtcccagaaaatagcatctaataacactttctcttaatcggtacctggctatcttgggacagtgtcttttgttgttacttgttacttacagttgccaacagtttttgatcaggattagcacaaatcagttcacattcctctggatgaagatgggctacagctcatttgtgaccctggtatagtctggaagcttctgttcagttagtgttcaagtttgcgaccactagaaccagctgggattaaactagttataatgaagtataaactaggtgaatgaactctccatagagcaaatcaaacagctgccttaattcaaagatgagcaacactgaaccgatgtgtagagacccctgggtaggcacctggacagtagacagctgaccagggggaacagacaggcatctgcctccaggggtgctactgtggaggcatggtcacataagccttctgcagtctgtatcctaccagagatggagaaacatttttgtactctttcttgcaccctaattatctagaacagtctgttctagtgatagacagtaggatggaggtgccgaggaaggactgtggtgagaggactgggtttccagtgtccgttttggatgaacagcattgcaggcaagtatgtgatggccacatacttaacacaggctgaaaagtagttcagatgcaacgctttggattttggattatgtccattttatcacaataaaaaaacatcccataaaaccaaagagttcatgcctttcaacctcccccagggaccacaccctgctgtctcatttaaagaagatggttgtgtagaatatcatttgtggaccagagtccaagaagatagccaagaacacaggggttctgccctccagtgaatttgatgtgcctctgcacaggtcatgtcacgtgttttataggacgggcctagtgacaatgaaacaagactcccatttagcccagcctaacctggagatgtggccagtctatttgtcaatggagggagctgggagggaagagagtcagaggccacaggctgggggcaggggatgaagaaagcccttcaagacagatgtctgattataattgtcagactctctacccttacataagaaaaacaccaccctcctccttgtccctcacttctcctccctgaccctcatccctcctccccatccctcatccctcatcaacattcctgagtgctcacctaacattgctctaaaatcaacatgggccagatcatttcttgggcgtagggttcacctcagggcattcaaatacagcaattcatttgcttagtgtttttggtatgctgtccacagaatataatcacttgctacctcatttgaagctcaccccaggactggccctgtccccaaggctccaatgcacacaaatcacctctaggattccagtggccttgagtcccacagataagttcctccttgtgctgtccagcccccagccaccctaagcaggccaagatggcaatctcccatcccgaggctggacattttgattacccttattatcttagcttgctttggctataaattttattagtggccataaaattatccatccacagcatttgactcagtgacctcttgcgaaagagaattccacaactggagacacccgaggactgccatggcagctttgcctccccccctttaatttatagccttacttccttcactgtcttccctgtgtgatgagactctacaaacgaagaaggaggctcatgtcctgatagccgttatcagggcttacatctggcccctcagcacctgggaactgtttgcttttattctttgtattggcagaaggcaaaggggcagggccacctgcctgctctgcaaaggaccccaggagcacgataaagcacagggccagctgtggtaccagtttggattctcctcttaaattttatacttccaacatgtgcaacctaaggcacagcagtcagtgccttttcaaaggattcttagacgaaggataaaatcttcccatcaggatggagctatgccctttagtctgtcttgcaggtgtgttgaatcacaatgctttaatgtctaacccttagtcatgtgtctcaaggtgtcttcagtgacatacgaatgtcacataagatgaggagtctagcagatacgagaaaggggcgtcagacatcattgaagagtaccgccctaaccatgaccattgttgagcatcagtaatagagtatgttttctgctttgtgtcttaattttattatgtgtgtgggtgttctgcctacatgtatgtctgtgtattacatgcatgcttggtgtctacagagtccagaagagggcactcctgggacccctggaacttgagttacagacagttcctaacagtcatgagggtactgggaactgaacctggatcctctgaaaaagtagccagtgcccctccagcctgagagtgccatgtttatcctgtcagaaccactgttgtcaaataaggttatcaactctaccgcatgggaaaaccctggccactctctaccctttgattgtattggggatatcgtgtccaccaccatcaaaggctgtacacagctcctgagccacgcccacatttgtatatgagagctgcaacaaagagaaaggaggcatttgagtaaaagcctccagataccctaagttttctatctggcattgtgtgacttttttatatacagtcaaataaaaatgaagtcaaatagtgtgtgacttgtaatagatttcactctcaatttacagctaagcgaagtcagactgaagggccagattgcaatcccaacctgagtcaccagccctaccgtcacgggtggaccacaggctattcattcctccatcagttcccaagacctgtcaccacgcatcctttcttcatcaccccgagcagttctattccccaccaccgtttcccacccttaaaggcacagctgagattcagtgccacagaaagcattcgcagaccacaccctacacccagtgaccagggctggtccccccccacactcaacacacttgtcctcagagaatctcctatgatcttcctgtctttggcttttggtcatggtgatgaactcaggtctcatgtaggcccagcacacactccaccaatgagcagccagcactcttcttttggttcattctgtagcttcctgtctccaggtctctccctaattagtaggcaaccctttgaggtctatggctatggctattctcagtattaccatcataggacggtgtccgcatattgaatccatgtaacacatacactagtgagtatattagttagtaaatccacacaaacaaaagcaaattcttctaataggttttgggttgctggagtttttgtttgtttctcggggataaaggttactgcctttttttttttttaagcagtaaggtatagaatgcttacttcaataaaaagaaggtatttgggcataatctttaatcaatgcagtgctgaggggctggactagagaaagaaaggggaacagggggtgtgggggagcaaaggggaaacagcagagtgcaagaaagagacaaaccagaagaaatttgcacaaaagaatggaaaacagagaaagaaggcatgagtgtacctctccatcagcttgatgttggcatgtcacaaccacagctagaagcagggagtttcagaaaacgagatcaaggaccataggagctcagagcccatgagaggagcaatcagcccacaggcagttctcaccaccctgccccagtttttccttctaccagacgtgcatttcagctgaactcagagccctgaagtgctagacaatgcacaaacacagcaagcctaagacccatttcacaaatggagtcattcccctcccacttaagacatagtcctaaccttgaaagacagaggctcgccatgcctagatgtcgggatactggccctatgtaactctcgaaaaacagcagcgtttgttagttatgctgccaagggtaaacctaacaacattaagggactgcacattagattagcgggaactgctgtagcatttaattctaatacagatcatggccttttccatttatgtttaatcgtctatgttttcttgtctctagaggtcatcaggatgtatctctaagaagtcatcatgtcccagaatctgtcaccattcttcatctaaatctgggctggtgctttttgcaagagaccaactgtgatccatgccctggagttgaaaaatatcctacttccttacattttcttacacacacacacacacacacacacacacacacacacacagagagagagagagagagagagagagagagagagagagagagagaggcatgcaggcaggcaggcctcaggtatatgcacacacgcacattccgcagagtgctaggggtggcagatggtcgaaaggagagctcatagaaggcacagggtgacatctgcagtagatgcagccatgacaggaactatctttaggacacagatcagtctgagaaggtgcttttccttgttgggggtccttcaaggaaactggcatcattccaggtggctttagattgcatgatttaccctgttttgcccagatcagcccacatcatagccagaaacaagtcagagacaggacggaccaaactgatttggtattatcatcctggtatgtggcagacacagggccctcaataaatgccatattgactgagaactagttgtggggcagactcagctggaacaagatgggaagctttcattaagtcacttcccttaatcccaatttgccccgtgaagggatctggtacacgtgagatgaaatgacacactgtgccccgtggtctaagccataatgaaacacaaggggggaacatttagaaatacaatgatatccttaagttcattcttgttcagcacttcagcagccttcatgcataagcttaagaacatgtctgcaaagacaacaacaacagagcccataacactgaaaccatcaaagggaaccagggctgaccacgttcagtcagctggctgccccatgatgccctgccttacgcagttccagctctgacgtcatatcacactgtctgcttaccaaaggcagaaatggcaaactctacacaatcaaaaaagaaaaaaaaagcaacaaagctggaaaagcacttagatacatactagaccaattttcatgtgtctattgacacctgtcaagaaatctgcctaggggaacagagctctaaaataattgaaaatctcagaaacacaaaggagacaaatggtgtccatgggtgaacatgaaagccaaggttcaggtctacacaaagaaccagctgtgggacctcagtaaagtcaattaacctttccctaccctaactgcccaaatcagagatatgcaggaaagaatattagctagaaggaccctcagatattttaaccttaaaaaaatggcttaaaaccaatgtcataaacctttccccacaaacctgcacaccaataggcaggctggcaggctgagctcacataatcctctgaaagttctggaacttttcttctggtttccccctgacttttagatcacttggctgtatgaagccacagcttggagctttaaactctcactccgtttctacatgccagggatgcatcagggctgtgtgctgtcaagctctaagtcgccaatcctaatcaggacagatcctaatcttgtcactggacccaggatctttgccaccctgcaggcctagattattaacctaatatacttgtatgtgtcatgacttcatctttcactgagaagaataacattgaggactctttacaagttcaataacatatgagtattctctctatttgcttaactctgaattcacatatctaaaacatttttactatttttaaacactaaaacatttttaaacttatttttaatcctggacttcatgacttgtaaaacaaaattccaaagctattttttttttgctttttcagatttatttgaatatgtccaatatctcgactcctcctgtctgcatacaatcatcaagggttttctgagtgattcagcatcagagatttgtataatctcactatatctttaaatactctggttttttttttttttttttgtctctctcttctgtttttccattgcggctgtaatattccatctagtgtcctggtttcttcaatagagggttctgctcaaatttcttccctgttcattgaagacatagctttttctgtcctattgtgtatgctatggttttttcccaagctcagctgtgctttctacttgtatatgggtcagagtcaataccaactaacattgtaagcatatctaactagactcctctagctaacaaaccagagccaacaagattggcattcccaaacacctcagggagcccagccagcacagtttattctcaaagttggacctgggggttcatctctgccatatctacccttttgttataaaccttgggtccctggagtgtgctatttaaaacagatgatctttagggactctcgcctttcatacccacttgaaaagctattcatccactcctcagttaaaagactctacactgcatttgaaactcagacttgctgcagttcccccaaaacagagttattcccttaacagtcttgcccaagaaggcaacaatatctcagctaagcctaccatctttctcccactccaccccacaaacatggctctgtcctcagcagcagaaaacaactttagagtctggagggtttccatatatgtgaggcaagcatacatacaggcctcggttctcacatccaaggtctagaatcaagctgtgcctaaagctgcagttttctgtacaaagatggtcacacttgtagtagcctctccccagtggacagcaacatcttcactttggaaggttatgtccacaaacattgtgaaataaagtttattatcctacataatcttcttggcacaagtgttgaaaactgagctgttcaagtttctagaggggacatcacaaacagaatcatggaaaatgggcaagaatgaaacaacatgtgtgcattttatagttcatgatttagcaagttctggccaaagcaaagagatactcgctcataatgaacgcacacgtgcacacctcagatgttcttggtgcaggaagtccaagcaatatctctggaaaagaatgaaaacctcactcctcaagggggaagaacactaagaaatatcttcaaaatacacgaaggcccatctgagagtcaaaaacaagtctactctggaaaaacagagaataaaggacctcagcgattagccactcaagcaacccagctacagaatgagggtgcaggcgatgtagcctcccccaaagcctcctaagaacaagagaagtagccatctgtctggaatgattctacagtacatctaccagtacggcgagatggaccaggagctgcctcgcctatgaatggactgtactggtgtcttgtgtatatgtgcagatgtgtgcacgcatgcatgtttgtgtacatgacagttatgcacccccatgtggaaccaggaaaaccttaggtgtcatcccctcatgaaccatcaactctgcatttgtctctcatgcctggagcttgccaagtaagctagactggcaggcaggcaggcaaaccctagggatctgcttgtctctgcctacccagcactgggatttcaaatatacaccccctttggatgtttcattttttgtgggttctggagatcaaactcaggtccacatgcttgtaagtgaggcatgtactttactggctgagtcagctcccatatcacaatctctctctctctctctctctctctctctctctctctctctctctctctctctctgtatctgtatgtatctcagtctgtctatcccccctgcccgtgtctgtatctcacatatctaaggccagccttgaactaactctgtgaccaaggatgaccccgaatctctgatcattttgcttttattctgcatgtgcttgggttacaggtgtgtgcccccacacatttgtcatgtgcattggggcctgaacactgggctctgtacattctagacaagcactctactgacttagctacatgcccagatttcaaacacgagtcttccaaggtttaagaacttctagaatctagaccatcacaggtccctagggaccgggctgtcctccaattaatgcttcagaaagatctcagcccagaatgaactcagcgtgcaccatggtggcccagtttctctgccgattcctaggatagccttcagtgttacatgtctacaataatcctttgtctttcatttccaagttcatgcaatttaaaacacatcttgctattaccaagtccatttccacatgtcaaatcctgcccctaaatgttggtgcaggaattgtgctcgcttgagattatggactagcaattttcaactagtcattaggaaggaacgggctgcatttatgaaagatgctcaattttcaaattctagaggaacttccctcccgatccaggtcaccacagagatcctttgccacattcgagggtcaaacatgaaagggcagcagggggaatgagaggcgtgggctctgtacccagcgagcctgccaaaccccgcagacagggagagcgagatgaaggcaccgggttaaaggaactttgttctgtgtgagctttgtttaaatcccagagtgggagatgacccacaaaaagccacttgaacccctttctctctgcaattctctgcttgaaatacagtatgtgggagttctttcaatagcagttatgaagccttttcagaaactgaatctgaacgctgcacagttatgaatgggaaggggagctgcctaacaacaacctgcgagattgaacggctgccctccccagcctcgcccttcgcagacccaaggggcttctgggggcctccccagcttcctagcccactgccaggagcatgagccctgcgagccccacccctctcccttgcagactgctgttgtttgcactctagctggtctattggaagctggagtaataagagcaaactctgctaaactaaattgctcctttgttcgccattatcataaaaattttatgtaggaactaataaaaacatgttttacgtgcacagttacatgggtttacacaggcaataatatccagcaagatatatccataaattcagttatagacactaaggaataaatattttatcttccccaatggtttcatttattggaaggaaggtgtgaacacagaggcagatggctggcctgagacttttaagggcccttaagtccccctgcatgcctctctgtggggccagacaggttctttcagaagtttctggataattggcacaattcgttagccttctaaaaactctgtgactcaggcctcccgtctatataaatggaacattttttataaaaagctttaaaaaaaaagtaagtcacttttgaaatgcggatagagttgtctttaaaagtttttaagcaaacaaaaagattcaatgctccttccaaccaggacattagggcagatggacaataactttgattaaagaggccttaatagaacccaaatccaacgacagttaaaatgggttgctggccatcttgcccatccgctaatcaaaagtatgcaatgcaaactcctgcttttgcactaaatgttctttcctcccagagtggattgttccgacataaagatggaggtgccacaaacacgtgtcacagctgctcctggggaccgtaaccagattaaaaaaggaaaaaaaaaaaaagaaatgaaatcaatttcaatggcattatctctcacccaagagatacaatatacatttgatatatcattattatgtaaaaacaaaacaaacaaacaaaaaacttactccattattttccagggactacatctttgaatcctgacaagtagttatcacttagggaacaaagcagttttgactagccaggcacacttcaaatgtcaataaccatgcacggctattggacaccatattggacagcatggccctaaaacaatcctaaactcaccaacgaagagatcataaaaaaaaaagactatgggacaggagagatgactcagtagctcacagaggacctgggtttcctcctcagtaccaaaatgctggtccacagccatgcacagcttcagtttcaaggaatctgatgccctcttctgacctctgcaggcaccaggtacacacatggtacatatgcatgcatgcaggtaaaacactcatacacacgaaaataaaataattatggtccccagactgacagctggaaaccagccccctgaacatgggtgtcagttaggagacctgggcagtctatggggcctctggtaatagaacagtatttatcccaagtgtacaaatggactttgggagcccactccccacagagggataatctctcagcctacacacacagggtcctaccccaaatgatgtgacagactttgatgattcccccatggaaggtctcaccctccctggggagcagaagggggatgagatgggggattggtgggggacaggagaggatggaagggagagggaactggaattgatatgtaaaataagattgtttctaatttaaattaaaaaatctagagaaaaataaaaaataataattaaatctaaaaaaagtttttgaagacttcactatttacagttaacaagaatgctaggcaagtattctaccactgagctggtccttgccagagaccctgcttggtgactttatactctgtgaacataattctcctgggttaaaactgtgaatttagaatactataaaatcagaaatcactaaaattacaggtctttctaaaagtctcactttgtttactgcttactctaactagggctcagtaagcaaaggtaaggtgaaccacgaaagaccagagattagaaattgttgccactctgacccttaccagccttccaggcccctgcagccttgcaaacatagtcagccctaaagtcccttccacagaaaatagtgcacttgtaaaatgagaacctattttttcttacatttaactctctcttcaaaggacttatgccacagaattctgcaaccttttgaaaaaaaagtcatcttgtgtcactttcccactgcctctctgatctttagacactgaggaaaccattcatgaagggagttttgaaagtgaggcaccacagtgtgaaagttagcgacagttggctccacagccctggcttttattaagtaacctttggcaatttaatcagcttcttgtgcctgaacatgaccatccatctgaaaaaccatctcagtgattctaatgtgcatcatagctcgcaaatgtttttatttatgtgctattgtatttaataatgcatattgatgcatgttaagcaggttgttgtgatgacagggaccagaactgctgaatgtcccttttcattgagctggccaaagcaccgcctgcatagaaatgctcaattatcatccgacttgctgcccttaactcatcagatgcagaaaaatactgagacaggcgcctcaaatgaatacaaggtatttctatttgtggctagattcataagcatgcattgtctcaataaaaaacaaagattctcaaaatgatttttccccctctggactcaggaaagtcctgacagttttgcaatagacaagttatgaagggtgtcacaagagctgatgcatctatgttttgcatcaaataaacacgagcatggaagaaatgtgcatccctaactcctcacacaagagagaaaacacgttacataaatgggtctgggtttgaccgtgcatgcctgtaaatcccagcacacaggaagtggaggacaacctaggctactgaatgagacctgtctcaaaaagaaaacaaaacaattacagggccatggttcagtggcacggtgcttgtctgagcacaagtaagtctgtgggttcaaatccaagccatgcaagcaaaatagtaacaaaatattccccatagactagtagtggtcgtaggctccagagaacagaacctcggctttcaggggatggagaggtaggctgtgaatcagatgtgccctataatcagaagtgtccctatctaacaatgcaatgtatgctgttcaaatgaccaatagctttgatgatgctactgctggaaggttttctaaacaaaacaacacaggatggttaagtgccgtgggacctaatacacgatgtatgtagaggaggctaacagtgccgtggagaatgccaggagacaactggaatgtgaatatctaacagcaaacactaactgcagttgatcataaccaaaagcctagaagtgaccggatgattgttacataaatgcaggcatcaatattaattttaccaaagtcaataactatattctggcattagacaaaatgccattccccaggagtatgcattgacatatttgggtataaaggatcatgctgtttacctcttacctagaaaaaaaaagtgagaaaatcctgatagttaaggaagcacagggaataagggtagcctttgtgccatttccagaaaataaaattatgtatgtacatttatgtgtatatgcatacatgaatgtatttttgcttcccttagcagaggatgaaataatgggaaaaattcttcccagtcacattttatttcaagattgtacaagataatcttgttctctctgcctaatttccatagcaagatctggattctaacataaaaggtaaagcgttactttggtttggtttagctccggcaagggctggcatctcaccaactcactgccccatggagaacttgcattcttccctctgatactctgtgggaagaagggcgagggttataggacccaggggcagcccagggttctgccttctgctttcatttccatgagaagacccaggaatctctgtcaatggttaaaacaacccttacagtaactggaatgctgataggaccctccaagaagaaatgacctccacgaggagaactccagttggccacccacagtcagctttgctttgcagatgatcaaggcacctacaggaaccagctgggtcacacagcaagagaactggtttgggaaagcatttttattgccttccttcatcaaatacccagaaatcccactcaactttggagcaaccaaatcctccagtttaacactgaaaacttccaaagacaatcatgcaatcagggcaggctgagacctcaaaggtcaacaaacccatcctccctcaggatgcaagattctccgctatggctacttcaggatccttcggagatacgaagttcccactttccatagctctgttagatttctccgccagttagccagaaacttcttcttagaaatagaagggaaggggatttgaaggcagggaacttgtctccaatagagccttctctacagtgtcttccaaatgacagtgcctaaaacattgaggatcttctgtttcctcttatctagttaaaattcctgtcctcataactatgcctcatattacataatttgaaaaccatggttagctatgtgattgctaccttcaatcatttggaaccattcatttcttcatctacttattcatttctttcctgatgaaatttgaagtttcataaagaggggttgaaaacagtgaaacaaacacaatggaaaagagcacgtggaaaacaagtttgagaggagaaatttaatctacaggagaattccatactattcttaccattgattgtaaatttgactctaatgttcccggcatgaaagtgaagaggtaaatgttaggtgttcctgtctctgtgccctaaagatgaaacagaccagtttctcaggagagacaaagcagtccctggaccaaggacagacagcctgaggagggctgtaaagtacaagcactgggtgacatgatagacagcaagagtctgactcaagttcacagcacacgctgaagcaaattctcttgtttcttctcataattgatgatggaggcttaaaggcagtctgtgggaagagaactcagagtgattgtgaaagggttaagttaagctgaggatgataacatacatatagaatcccagcaccttgggaggctgagacaagatgactgaagtgagttctaggccagcctggtctatagagtgagttctaggatagcctcaaaaacgcagtgagaccttgggtcttgagagcaggccagtgctctgtcttctgccctcatttccatataggaccctggagttcctgtcaattgctttgtctctaaaaagggagaaaattaaattgatttgatccaaatgtatgagcatttccctcaattctctaactctactagtaggccatctcagattagccacacaaattttagcaaccatttaaacgactgtcctttaacaaatacttctcttcctctgaaatttgagaaaaatgactaagagaataaatactctcattagtatgagggtctttgttacactggtcctatatattcttcattaaatggtttcataaattttagagaccagataaagaaagcataaacttatccttttactgtaaaaaaggtaaaattaagatgccatggtcctgctatccaacagaaagaggactgagaagtccccactcataaaccctctgaaagatgtagtttggggagggccaagtgtcacccttgttaacttttacagtgtcacttctgggtggaaactgtctcccattctgaagactaaggaactggagtccagagaactttgccaaagggcacagatctggacatacgcaaggaaagatctaaatgtcagactgtctggtgccaaatgtgctgtttgctcggtacataacctgcctcccttggtacactaatggattcactagtacactcggggattcactagtctctataaggtataagtacttcacatggcttttgtggggagcataagacccagtgtagatgaccggctccagcaccacaatgcttggcttttgattgtccccatatgttacaggcttagtccctacttggagctgctgctgaggggtggttgactgttcaggggggagtgtggtgggaggaggtttggttgctggagaatgaggagcctagcccctcctatctctctgcacagcttcctagccatcatgaggtaagcagcctgcccaaccgtgtgcccctggctatgatgaactgcctcatcgctgacatcaaatttgacagtgggtctgcatgaccatggactaaatccttccctctttttgttggccatgtcaggtattttgttacagaatgataaagcagactaacatgggaaggactggaggaagtctggttggtactatatacctcaaaacagagacatgccttcagcggccttatattgcatctcctctggaacatcttaatttgtcgtttatatccaactcactgtggagccattcccgaaaagaagagaccatattatacacgaaacaactcaagagaatcaaggttccaggatggaaccaaaaatcagccggtcccaaaatcatcctggaaaatcagcctcttttcaacactccaacagtggctttgttttcaacataaacacatgaccagatctgcttaactctgaacatattatgttacattattggcactcaaggttggcactgagaattgaaccactaacatatgcaatctatactgttgtagctataggtaaatcaaagagaaaaggggtttattgaagaactagtagagtttagagaaatgtttcttattaccacaattgcagaagcttgtttttgtatgtgtgctcatggatgcattttgataggtatgtgcatgtgtagacacatgcatttggagactgaggccactcttcagtgccctggttccacaagagacagccaccttgtttttgagacaggaattctcattagcaaggaacatatgttcctagctggccagcaagccccagggacccacctgtctctgcttcctgtgatgagtttacacaacaccacttctgaattctggggatcaagcccaggtccctggcttccatggcaagcactttaccaagtgatccaccttcctagccccacaactgtacacatttctttagtgtactgtgtatggtgctttggttgtgtgacttagcaccagatgtgttatttcatttgaaatacatgaagacaatccagccaagttgttggaaaatgaggaaatagcttcgtagcctttaacaccattgctgacactctttgatgttacactaaagcttaacaagtggccatttcttaaggcttgctgaaatgagaaatctggaattatatcaggaaactgtgtgcttggggttgggagagatggctcaacagtgaagagggcttgctgctcttgtaaaggacccagcttcagttctgaaaacccacagcaggcatctcacaactgcctgtaggtggagttccagaggatcccctttacgccctcttctagcctccaaaggcaaaggcttcacaggcatggtgtacacagagacaagcaggcacccgcacatacacatcaataaaaataaataaaaagactctaggtaccgtagtgtactgaaacccattagattctcatgcacttcaaatgatcttatgttacaaggtctgtaatataacacccaggttatgtgcacaatgctagcttgctgggttatacacagcttcggaggttgacacattccgtcatggagcatcaacaagtcccatgtgttactatcaccacgaatcttcacagagaagtcttttaaggttgggaagcatctcagctctcatggtgctggaatctattttctaaacttggatctctcaacagaacattccagttttatgattgacaaaccagtcctgttccttgttttcctttaaacgttctacaggacaactcattccttcatccattttgagaaaacttcttcaaaacccccagttttgagcaagtagagtttgtctgtctattttgcctgtattcttgcaggcaaaaatgtattccaggaaaaaagaataagaatccagcaaagattacaattattgtgcttttccttatgacagtcgtaccatgccaccccaaaggctacatgtcagtgagtatttccagattggacaaaattaatcccctcagttctttcatcaagagcattactaagtggaaatgtgcttttaaaagctaaccctaaaactagcaagatggctgggtgggtgaagccaagcttgatggcatgagttcaatccccaggacctatgtgacggaatgagaagatccatttctgctatttctcctctgatctccacatgcccatcatgggtcacatatgtatatgcacacacgtgggagcactagtacacacacagagagggggggagggagagagggagaggggaagagagagagagagagagagagagagagagagagagagagagaataaataagtaaatgttaaagaacatttcaaagcatgtgtgatgaataataccctgactggtataattactgctttgatccgtgcttaggggaaaaagccagcagttttaccctttatttcctctgcagcgtcagaacaaatgtcaacacagcaaaaggggcaaagagtgactatgtaagctgggaaagcagagggactgtgttggggttgtgttgttactgctgcctgttctacgttgctgaggctggaacatggggccttgcatattgccaggcaagcactctaccactaagccacatccccaaatccatgacaacaactttgtcattataaacctagtgacagggtcttgagaaatcaaactccaagcaactcaggaagagccaacagaagaacctgatgccagggagatggatattaaggaatcttgagaaagcagaaaacccccactgcattctcagtggggatggggtggggtatctcggacctcaaggcttctcaagtgatgtcactttaactcatatacaagtacaactttcatcatctttaggttgatgtcctgtaagctccagctgtgtgccagtcaagtctagagatgaaggtagctgacttataacttgttcccactctgctggaggcctatgtttgctagtgtgcacactgaatgcacacgtgggaagaggggcttttctgtggttgggcccagtacacactcacaaagtactaagcagcagagagagaacgacactctgaggagaaaggtgacttaatggctgcaatgctgactttaaaaggggacactcccatccctggaacactgtcttttttaaccaatactcatggtcccagagtcaatcatggggggcaggggtaggcatatgggaaaaggctcagactttctgttgcatcacagtgacttcttacagtccgtcttgggcatgctcgaggttcaaaaacaacctgtttgttgggtggatagcttcacttatacaacatatacagactcagagtggcattactaattggaattcaatcctgaggaaactgaattgcaagggcagccccctcacagaatagaggggtagccagtaccacttccccacaggcatcatcttcccactgtgactcagcttcccttccctctggggacagctggaagcagatatggaaggaaagagctacacagtcatgctcttgtttgcgtagggaagctacgggaccagattaattaccatagtcattatcttggcacagttctagcacagtaataaatgctaacagcatcatatgtgcaagatgaagggagaaaaagagcaacactgggcaaactaggactgtgacaccaatgtgactaagcatttaaagcagccgctgtttcttcagcaattaaaagtgcttcgttccccttcagtctcgttcttcgtcagacaagcatgttttcaatggaaactatttatccatcccactgctactcattcaaaaaatgatggatacaagattttttaaaaatgagtatgtaaatcttctgcttggaaaacatttttcttttcaaaactacgatgaaaacactggtgtgttcctctccgaaaacctttctccagaagaccaactcctaccaaataactatagcgaagacagtgtcaggacagtccccaagactgtggagactcaggtgggcgagcatacacacaatacaaactaggaaaaacaagcacagggagaaagctaatacctcgcctcttgatgactttaaggggggcgggcatggaatctcaggacctttgaattacaggctggccctccaaaccaaaatcgtattaggtgagagtcagtgagtagagctcagcactcctggaacggcctgggtagatggccggagatggaagagggacactagagggaaggagtataaaattccccttgatgctctcctagtctgccaaattccacaactcccacagacaagcaatcacgctagcatgcagataagggaggcagaacacagctatgaaggcggagcgcagccttgactagttacgacggcagcaagactacagtgatgatttctttcaagattacttctcagatccataaagttctccaaaacatggcttgttaaaagcatgtctcccagattgtttggtggaattctcactgggctctacatcattgctatactttgtccattgtcaatgagcccatatcgcagaagctacaggagccaagactcctgaagacaggggctcatcctgactcatctttgtgtccccagatctgaacacctggtggtttttgggtatgaaatactgaaggaaataatgtgttgaattcagtcttcaaaaagaccccattttcttctcccagcatcagagaccgacaaaataagcatcgagcttaccacagttagctggctgggttgttcattgcctagcttgtcaatagatagatggctttaagaatgaggttgtttccaggaagacaaggcaggtgggatcttgaagccaggtgagtatgacaccatggcctttgctgtgtttactgctgacacactccaagtgtggggcaggggagggcagcataaaccacaccatcaggggtcagagttctccacaggaggaactgagctgggcagcagggattcctgaagcctgaccccacaacttgcaatgtccccaccactcagcagcatctaggttacagtctgttcgctatcaggagcaaggaatcactcagccattcctaaaagatcattggcatgaatgtaaacacacacacatacatacacacacacacacacacacacacacacacacacaaacacacacacacacacataccaatttcccataccaaaacacacttgagttgagtgtctgtagataatcctttgtgttcccactgtaactggctcaacaaatgcttgctgaatgaccgatggatgagcaaacctatgtggtgtggtcaaagaataccaacactacttctcaggtgtctgtactggtgtgaagtgactgatagtatagtgcatataacagccaggccaaggatatggtttccagagctctcagggccttccttatccacctaggaagacctgaatcccagaaccatctttacagctttctcttgtgtgcctaggctcacctgtgcccctccaacacacagggaagcctcactcctaactagatcctcaggctcatctgtctccagaccagagggtcccagagtaagcaagagctcacatgttctcacatgcctgagcatgagctcttgttcaatggtctgggcttcctgtctacactgcactcgtgaatggcccagagccttttccacactgagcagacacaggcaaggggcgttgttctcctctctcctctccttatccctcacgcaatcaagcctcaacgtctctggcttcttcctaaatacccgtggcacccctaagcctctgtggctattatcctccccaatccataaccggttcttccttctctgtgcctgttcaaatggcatgctcccctagatccacctgggtcccagctaactgcctcttcatatcgcctaacgaccaggagccttgcgcgtagtactaaggggaaatcccaggaaagttctgccttctcctctgcatctttcccaacaccccattctcatgatgagtcccatgtttacagatctgttcttatctccatctccttgaaaccttgccccagattggcttcctagtctggggtcacgcacaatttgtctataatgtttacaataagattatactagaaacttgcataccttgggaaatatttatcaactatagacaggttagccctcagtgctgcattggctcattttccatttactttacagctgctttggagaggcaaagtaagtgcttaagtaaggaccttgtcttacttcccattttctttttggacaaatctttcatataagttcctggtaaataagaggattaactgattttcattgaggactcttctacatatctggctcattgccagaaatagaagtaaactgtccataaaattcaatcagtaagggtgaggagagagagagagagtatgagccattacaaacctagaccagtagcccttgcagcccaccatggttgtatgcttaaatgcagagcaaggacaaagaggagaatgaaggccagtgactgggcagctaaacaggaatggttctatgcagggcttccttaatgctttcagccagacaaagttagagactggaccaggctgattactaagacgaaccttacattattgttagtgtagaaatgtcacccctctgccttccccaccccttgtgtggtgatggggactgaacccagggttcctctgccatgagcctacaacaccggctccttttttccccttcctagtttgagacaggatctcagttaaagtttgttggcaaaagtttgaggaatccagaaatgtatcagcccctgtgtaggtagcattcctttgtgttagttcattgttcatcttttcattattctcttacttgggattcctatgaagcctctggaggtaatgcgtgcatgaagcactcagcttatagaatagtgtgtctactacatagtatgctgcccataatgagcacttgtgtgttggttacaatacttattttttactactgtggtgctaaattgatatttagagatggctgccaaaattgagagatgctgaacaaaactgagtataggagttaggagtgcgaaatgctggaccctcagagatgcctgtatgggctgacaaagccaggagcagaatgggacttgagctctgagcagctgggaaatctgttcaggttgtaacatcagcaacagagagggcaccagagttgagactttagaactttgttctctctgcattgtccccagggttttctcaaagggaaggctgcgccagagctgaagcactgggcacatgtgacccatttaccccagaactgtggctcagctcctccctcaagcagaactgcaacctgtggtctacaatggtgggactttgaaatgactcctaactatagcacatccatgttgtccttgttttctacagaaatcaccagtaaccatctttccactcattacttagttgcggtttctctgtgtagctttggagcctgtcctggaactcccgctgtagaccaggctgacctctaactcacagagatccacccgcctctgcctcctgagtactgggatcaaaggcgagcaccatgaccgaatgcacaaagaatctcatctcagtgccagtctctctcttagccctaatgggctcgataaagagacagctacctccaaattaccagcttgtaataagctgtgatggagcattgttttgttttgttttttcagtactgcctggacagagagggccacctatcccgatagcagtcattaatgcttacagtacgcaatcccatcaaagtgctgttcagatgagaaagcacaggctgtcttcagagggaaacccttgtctttcacaaaaagtcagagacatcctcagttgcctttgaagtgggcagtgaccgaatctccaagccttggaatggccttgcagagagcctgcgttcaagagatgaaccacaaagccactgctaaaaacagctcgggcctgctctgatgagcaatacttttggtttgctcatcagctcatcatttctgccactgctctgcagaggtgttctggttgcttcccatacgtcctcctggcccctaagtatgctgctggctggagggaggcagagagctgcgctcagcaagcggtctttctgtccctttgactcagtgtaggagccctcagtgtaggaccatcatctttctttctgtagctaccacagggatagagaaataatagctgcagctagagctaggtagattttctcatttaaaatcttcccaacaatattaggagattgatattattaaccttactctatagacaaggaaactgaggtttgggatggtcaggtggttctccaaatctcacaaatggccaagaggcctgtgaaaagatactcaatgtcactagtcactgagagtgagtacctacctaccttgaacctgttgggatggacaccattagaaaagacaaatgggggcgctgagaaggtgcttcagtcagtaaaaagcttactagacacatgtggcaaccttagtttgatacccagcacccacataaaagctgggtgcagtaggctaaccctgaaatcacagctgtgaaaagacagaaacaggaggatctgttgggtctgtagcaggcactctatctgaattccaagctttgggttcagagagaccttgtcttggggaaaacatcaatctttggcctctacacacacatacacacatcagcagtcatgcctgcctgcacaagtgcacatgggtgcacgcatgcacacgataataattaaaagacaaaggtcttagagagatgcggtagacactggaaccagtatatatcattgataagaatgttagatggtgaagatgctatgggacacgggtgggtggcagttccccccaataaattaagaatgaaattatcataggagctggcaaatctccatatctacctaaaggaacagaaagttgagtctgagagaaaactggacactcgtgttcgcagcagcattgttcatagaaccagaagccattccactgatggatgaatggattagcaagaaacagtgtacactcagaacattctatagcctgtaaaaggaggaaatgctggggctggagaaacagctcagtggttaagagcactttctgctccaggctccagtcccaacacccacatagtggctcacaaactgcaactctagtttcaggggattcagtggccccttctggcctatatgagtaccaggcacacacatggcatatagacattcgtgcagacaaaatactcatctgtgtaaaaataataataataatagccttttaaagattttaagaagggaattctgccatttggctcaacacaaattaaccctgaggaaatgctgagtgaaataagctagttacaaaggaaccaacactctgtgagtccacttattagcatatgcatagactaggcaaattcagagacaagacagaaagatagcagctcaggcttgggggagggggtgaggggttagttaaaatgctaaattgtgagatatatatgtgtgtgttatatatatcatatgtatatacacaaatatagcacatatatacacacatgttagaaaaaaaaccaacacaacaaatattgttcatatcatagataagcgagccagagtgtacaaactggtctagctgctttccccaccgtggtgaaaaagagctgtctccctagaaggttccagcaacaaggtcttttccccaaagacatgtgttgggaaagtcaatttaaacatatatcaccctgtcaaaccttgatctccttattaaggagtgaaggctcctatctcctctcactattcttaggaaactaaaacattttgacacgatcctattaagtctaaagccacctcttaggtaagataacattcatctcactaggtggcagcattgcttacaaggcctctcattttttttttttttttttttttggacccatctctgtctccccgtttatcccctccaacctccccaccttgcgttgaggaaaagcatcatgagtgttcatttccacacctttgtgcagagcgacacaagtaaaaccttggaaattctagtcgcacagaaccaccccaaagaaatcctccgagcagtgcgtgcttgggtcacctgtgtggtcaacccaaggaagtggcctcctttcatgacaatggtaaaaaaaacaatcaagagtatgggatgcctgcacttgagtccatctccgtcatgtccaagtcctaggtaggcgaccttgggcaggttacttgacacagctgagtctggatcatgctatatataactcatataagtcatatatatcatatatggatgatatatatatatatatatatatatatatatatttcatattttatataactcaccagggtgtgtgtgtttcctgcgatttgctgtaaccaaagtgagtatgtgaacaagcaaacgggcctgtccttccatttccccgctcttagagaagagtgggagccagccctgcgatgatgatggaagcgatcaggttggcccagattggacctgtcgttagacaagttctgctcacagccatcagtgtaggcctggctgcttttcactagatttccccttcccccagtgtctccatcattccctaagctatgcaaaggatgggttaattctttaaggccaagggtgttacacttaagacactgaatagtctccccaacccccaaaacggtacctaatatacttcctaaacacccaaattactccctaggagtgacttaggtatatgaaataaacaactcattagtgaaccctcacaaatatctttctaaggcagaatcgggctaatttgtcatgctaaagactgttaacaaggtaccattggaatctgatattaattagctggatgtccagggtgggttaagtggagaggaaactgtacattctccagtttattgaaaactctgaattatggaatactgttaaaagaatatggataatttataaaatttcaaatgagtataaaagcaaaaatattaacatcagtgcatcaattaggacaacaagaaagaaagcctcaagtcttctgcctcaaagtgtatttccaatatgagattcataaaccagatctgaatgcctggttctttcaaaactggccccaaaataatagggtgtttactctttcggattattttaaatccatgatcctgcagagcttaaatgattcaagtctatatatgtgccccctcctttaaaaggtccccaaacatgggaaagagttggccaagaaatcttctagtattttatcaatttgtccaccaatgtcacaataggatcgtttctacttaaaatgtgacattatcatctgagatgtgacaggctttgtggaaagctgcctgtcacatctcagatgaagcatctcacatgtttctatgcagagaggactgtggtgttgatactggctttatggtttgggtattgtttcttcagctaccatgagtgagtccattcagctctgcacgggacttgactgaaggaagaggggactctggtgctacagccagggccacatcatcaagggacctcatgacatatcacctctagaacaactgtgactttaccgaggagacaatccaaaccctcagcagttaggaggccccctggcaaacgggtttgcttctgtgtgtgagaggtaaatctagcatggccctcacagcttcccatccttcactcactgggtgacaatccctgatgctctgagtacctcagagcaccacacaggactcctcccttatttccagctcactgtggatagcacacatcttgactctgtgtcaactctataaagaaaagaaggctctgccgctggagacaggctaggggaggtggctggaaggagaagggacgcagagcctgtgcacatgtccctctgattaccgtccccacccctacccccagctcccacagtgcagcaatgctcagctttgcccgaagccagcctggcttagttgagaccagggcagacaagccaaaacaacctctgcccattggctggccccacgccacccaccactcacatgggttctgaggaagacccggcatcttcctcattatttccagcctccttctactgtctgggaatatttctagagaagaataaaaattatatagtgttctaaccaaattaactcaatgtgtctgtcaggtcaatggagtcccttccatgactgtcaggttagaccctctaactcatctccccaaggagggctgtacacctgctgtttgctcctaacctgtcctgtataagcacaagtgcctggaagggaccctctccccaatggctgtccattgtgcctactctggagtccctgcttggctcataagggtgtgtacatctaagccacttccctctctttcagctttctccgttttatctttgattcttttgtttctctactacttacagagcaggagcccagctgtgcatacctgtgcctgctcctttcagaacgggaaagagcccatgcccacttcattccctcaccccagcatatctttgtcaccatctatcactctatcaatagtcacacagaacttgccccaaagtcatgtccacctggcaccacagaatacgaccttctttggaaatggagtcttacagttagttaaggattgagatgagaccacactggttaatgagggctcgaaacccactgatttgtgtctttccctacatatctgtgtctttctctgttgagagaaagtaggacacaagactgtgtggaatcaggcaaagatggggtacagcacaacagggtctggaggaggcaagggaagcctcagaatagaagcctccagaaccaagaggtaagcacggttatgttctaagcagcctagttggtgaccatttgctatgacaattctaacaaactaatatatggctgtctccctttttcattctccaatgcatttggggtctagaacgttccccacaaagtcatttgcttaagacttagtcctcatgttagctctactgggaggtagctgaacctccagaggtggagccttgtgaaagtagtcactgaggacatgcccttgagaatgaccttgggacctcagcatcttcttcttgatctttgcttcctggccatcatgaggtaagcagcttcctctaccacaaactctcacaattgctcagagcagcaagaccacaaggttgagcaaccaggagctggaaactctgaagccataaacctaaaaaaaaaaaaaaaaaaaaaaaccttttctctattaaaaaagctctctctctctctctctctctctctctctctctctctctctctctctctctctctctctctctctctccaaatgcatatgtgagtatggacatgtgcatgccatggcatatgtgtggaagtcagaggacaactttgggtgtctggcctcatttttccccttatttgagtcagggcatttatttgccactgtaagcactaggctagctggcctgcatacgtccagggatgtcctgtctcttgctcccatctccctgtaacaggattatagacatgcactaccccacccagccttgcatgtgctctggagacaagtcctcgtgttcgtatagcccagcgagatatctcctagccgctctctgccttctaagttgcttgtcccaggcatgtgtcacagcacaccactttcctacatgaattccctggtgcctcctaggaagttattagaccagtggcagatgaatcattccttaaggctgggcttcttggcctcaacaattcaaagcacagcctggctctcatcctcggatattctcattttatgggactgtggcgcaaactagactttcagaatgtcttttaaatctcccaagggattctagtgtgtagccaaaaattgagaacaccactttcaaagaagcaaactgaccattcctctgcttcagatctgtggtgtctgtcttcaatttactaagtaacaacggtgtgagccaatccttacgttccagtctacaattcccaaagggctttcaaatacatttgatgcccaagatcccagaaaaggcaagaattactctgtggggaagtcctatgagaccctgttcttttggtcccgaaggcctgacggaaaagagaagcatcctgtgtgcatcccagtcaaggctccctgctcacagcctgcaacagtttctgcagtttcaacactctgaagagtggctacagactgcttgtcgtcatgactctgtaacaatagggaaattcaagacaactgaaaaccaacgggggcgggtggaagggcagcttcttattctgtggaggcagccaaatgaaatagtcccactttataacatgctggccaacccactgggcgaggtagttcctcgtgtgtgcctcgtgtgtgcaggatgaaaaacctacgtcctttggcatcctgcaggtctgcccttatcaagaccgttatcgaatgccctcaggagcctcctctaaggtcactaggacaaaaacacagtaacccattatcttaatgttctggggacgtctaagacaacctgaagaactggctccttcagaggctcggtggaaaatctgcctcctcacctcttccggcttctacagatctctgtcctcctagacctgcagctgcttcctccccagccaaggccagcagcatggcatcttccctgttctccctctctggtcctgctcctcctgtctctctctcctcaggacacttgtgaccccatcgaatccatttagataacagcagtctcaagctctttcgtcacgttcacaaagtcctgcacagggtagggcaaccacagaccaacctggacatgaaagcctctcagggccttcctcagtctaacacacaaaatgcatgagcagacttagagcactgcttaagcttcagatgcagttacggagctcccttttgaccgagaccctacccatcactcagaagacgtacgcactcctttggatgttcatcctggataccacatccttgagaaatgtgctgtacctagccaaatacacaaacacattcattttcccatgttcagagtttatgggtggggaggggtatagagagaaacaattcaatagcctttcaccatctaaaaacggtggcctttgtgacaccatagtttgtgatactctgaaccaaggaggagtctggataagaccccctcctcccttagtgcagaagccagatggcaacccgcagaagtggattccagtgccagcgacctgagattaacagtctttgctgtggtcatttaccatcgtgagagtgaatcaggccaaagcagctatcaatcaaaaggagataattaatctacaaatgactatgagaactgatacactcatgtccttttagtgtcaaaactcgcatggccaaacaatggctggtgagcaagttctggtttgtgtatacttacattacaccgagcaccgagtgtctgtctgaaaggcaatagaagaagtcaggctttcaaagggttcacctcatcttcgcctatgaaaccaactctcagagacatttcatgagaaatggtgtttgtagtttgtttctcatttctgaggtaatttcagtgcctcctaaattactcttttgcttccctcttgtgaggcagggacttcacaaaggatataggctccctgttggaagcctgtcctcatttgtcatccctgctgcatcggaggtgcagaaggacggcttcccctttaataatatctccacgggctcaggttcctgggagtggaggggaaccctggacactcattaaactctagaggcttccctgctcaaggaacacttgtggctgcaggccagaggaaatgtgctccacagagcaaagtgggagtaagggtgagcagggaagctgcagctggctttcagagcagtcaaccatctctgacgagctggctagactgcgagctacatgatatttacagcagggagatgttcacaacaggagacactcagtctgccagatccagagcccacgccccggggcatcagggtgacaacacatgggatactgattcatagccagaccccaaatctctttatcccggagagatttcctctggtccctttaatcattactcaggggaaattcatgagtccgtcagctctggagttgccaataaaatgtatccaggacaatttcaagatgggaatttgtacacattgtctttgactctgactttaagccataacaagagctggattcaagttcttccttacagtctcagaatggccaagtatcacccccacccctgtctcacctgccaacctcatgtgcagtgtgcctggcccctccatcactgtgatggccacgggacaggaacctgggtttccaaccaaaggaggcagtcacacctaactcctagcacagtgcctactccatgacaaagggcttttaaaaagtaattattcttgtacaagaaactctctttcatctgggatggggcaggagatgaggcaatgagaattattgttaatatattataaaaagaatacatccataatctcttattttccctttaggcaacttccaggttgcttctctctcatacatctccatccctgggtattttatattaaagctgtggtcctaaatccttgtcctgtgccatcagtcctggtatagcagctgagtccattgtatagtccagatactggctttgatggcttctactgtggaaggtgaaatgtaattctctgtgtaacatgagtatatagcttgcactatcagagacatgctaaaaataccacctgggttgaaaactgttcaactgggcatgagattcacactcacaaacccgaaatgccatcattgatgtttgttatagccattaggatgccttacagggtaacaaaaccaaaatgccatcattgatgtttgttatagccattagaatgcctcacagggtaacaaaaccgaaatgccatcattgatgtttgtcatagccattagaataccttatagggtatcatgtcaatatcacacatatcacacatcatatcttacttctttcctagcaatgaggtaatacagtttgtctcaccacaggcccaaaagctatgaggttctgagagtcagtctccattgtcaacacaactgggtttagaaactcatgagaaacatgccactgggcatatctgtgggcttaactcttaggtaagattaactgagtagctgagtccaaccctgaacatggttatataaaagataaagccagatgaacaccaggattcccctctctgcttctgttctgcccataatcaaggagggaagaagtctcagccagatgctatcatggagcaactcgcatccatacttcccccaccattacagagatgaactaaaacttcttcccgtaaagttgtcttgccacacatcctgtcagagtggtaaggaaagtaactaatacagaggctggccgatcaaaaaccgtaagtgtgctaaacctttctcttctgtgacaccgtcactttctatatctgttgtaatgatagaattctatcacagggtctgggaagacggtttagtggttaagagcacttgctgctcttgcagaggacccaggttcaagtcccaacatttccatggtggctcacaacagtctgtacctctggttctagaggctctggcatccttttctggcttctgctggcgccaggcacacattcaatacacatacatgtatgcgagcaagaaactcataaacacaaaatttaaaaacaaaaagaaaagacagctaagacagagccctaggcgatgactttcataactaggccatgcagtctccttaaaggcttccttgctggttccttatcctatttatacagtatataaatatagttacatgatataatgtggtatatgtagatcaaccacacagaacttcatcgaaaagtcaaacggttcctcagcttcttcaggtcaaaataagaattgttttccttgttgttctaggtctcaaaggggattgcacaggacccaggcaggaaggttggaagcaacagagttggaaagtcagtgttggcctgtcactggctgtgtagtcataagtcattcatatttcctaagcatcatgttccttgactacaaaaagatctaaccattttctccttgccttacaggcccactgcagggttaaataaaattatttgggggaactataaggtacttaaattttatcagccacattgagttcattttatgcttccctgtatttctcctgcatgtcacaagctgctctgtgtactctcagttggtttgttttgcttctgggcacataggtgtgttggctttcccagtttctcctgcagggaattggggctagagtctggattcttgacagtagaatatgaatggaagcactgtatacccaggctaaaaccaccgtgggagcctccgcaccttcccttcatttcttggctggttacagaagaccttgtggacaactcttgaggcccctgaaagatggggacacatttgatgaaggaagtctgagtctctatatgataaggaaatgctgttcaccgcatatgacacagcacagacgagacgtgatctggcttgttcagaatcacctaatataccagttaccctcctaacaccccataactatggccacctctccacatcagtgacagtcaagagtctatgccagtccctccccacacagcagacacagaggacagaagacacgtgttgactttgaccctcatccaatagaaagctcccctgggaaaaaaatcaggacaaattatttttcctatatttaggtttggtttgtttggtttgtgtttatttgggtgtttttgagatgaggcttcactatgtacctcaggctggctctgtagtccaggctggcctgaaactctaaattcttctgtcttcctggtgctgggatacactaccatgtctagataagaaaatttttctttcagattagaaatctgctctctcactttcatataaggagacccaagagcagtgctcatttcagtacctacagaggagaaaggaggaaaccaagggaggaaggcttctgtgaccaggtccaacataaagatgagtctcagacagaaaaagaaaaaatgaccaccaaggtaggagagcttctttgtgcaaagttgttttgctagcatgtgttcaggtcagggtattgggccagtctgagaatttccaggctttcactcataatcactatcccacacagtaaagctggtggctaggaagcccttggtgctgcccaaaccaacaagatcccttcggggtggggtggagatattaattgagcaagaagtggttaggaattgggagttgatagatattctctcaaagcatgcaggcctggctggagctccttggtgagaactctgtggagttatatagaggcatgaagccattgacctaggagctactagaaggaaaagtagatacagcctatggctgcctcaacttttaacttctacagggagatctggagtgtgtactcattccactcttgtatttccctgcttgtagaggtgcttacctggtaggggtacagggtaaccccattggttcttgaaagggaccaggtgccatccagatattggtgagcctgaatggccaccgagttaaggatgttcccattactgggactggtggccatctggaggctgaccttggcctggtgggttggggatccacccttcttttctgcaccgttgctgaccccaaggctgttgggtttgccgctgtgtttgttgacaaggcctgtgtaggtagaggtggcatagggggcaggcacaaaggcccactccctgggttgctggagcccacccacgtgccgggaccccaccagcgtgggaatgctggagatcggagggggtgagcccagagaggcgtcatagtgctcgctgcctgctgcctgctccaaggtgagcaccatttggatggcttcctgctttagctggttcaggtgtgtggcacaaatgtcacagcggttgtctcggtcattccatgacttcctgatggtattagggacttggagtttgtcgtgaatcaccgcagagaaagcagggtcctagagaacacacaagcagaaaaaaggaacagggtgtaacttaatgctagcaagtccagtttagatgactacagcccaagagtttgactgtttgatcagcgtccaccaggaaggagcttgaccaggaggagcatcaaatggtggacacatgcaagagctaggtgctgaaaactttaaagacactaaacaaaacacaatctctaagtacccctgctgctcagtcaaaggaaaacattttagattctcctatgttcataaaataattatggacaagctgcaccctcctgagtccagtatggtgggggtgagtgccccattgtgggcagcacagagctggcaagtgccacttgtgactgggaacagacagtctattctgctgaactttggcctcaaccacatgtgtgctaagtcagtgccgcaaggaagaagactaaccaaatagattctagatccaggattcagcctgctccagcagccaacacgactctgcccacacctcgtattgtcacagacactgtgaggagctgtcctctgtacctgctttgcaacttcctgactagtccaagatgcttcctccaccaaacgctccacctaaaactattaaaaatcttcagccggctgtagtggctcacacctgaacctggttcacgccagcactggagctgagaagtgctatgaagggaggcctctttctcaacccccctctcccatatcttgtgctccaaggtcatatctaaaagataagtgtggggggtggggtggggggtaatgaagacactgtctctcattcactttgctttaacttgtgcagaaatagaattacataaagaaatagctctgggtgtcaaaacatttcccagtgctgttcctcgtgcccctggagatctgcatgaccttagacaccttactggttgcactgaaactctcctcactcatgtagccgctgtgtcctatccttgatgtaataccttccagctccatgactttatttgtggggaaagtgggataggacagtacagcccatgcgtgtatgaacagaacttcctcagcacagtttgggcccagcagaatttgcaaaattcaatggctattgagagtaacagatgaagctcatctcaggagccaacaaaagtgcccttcagaaaagtgctgtcagtttttatggagcagaggcgcatctggactgagtggcgcatacggaaggcaaggcggggcagccagggtgggcaggaaggtcgtcagtgggatgttagttcctaatcgagatctgtctggatgatgggccccagcattttggtttccctgtttaactaccctaagcagctcctcatcgtgcactgattaattgattaataaatcaagaggcctcttcacagagcagcagagaggaaggctcctgaggcggaaacccaaggcagcctctaaagtgtctggagcaataggaggtctggatgatcaggttccccctggagaagccatgcatgcaaaccagatgagggtcactcatggcatcctcctaagaggcagctgctttgtccagacagtccttaatcacagctcaagagcatgtgggacccaaaagaactgctgaaatgtgaggggtggggattctagaatttagagattaccaaaaaggcagatccaaaaagatgaaaactttggagtacccatagacatcttgaccacttactcgtgcgtgattttttttcacttcaagagtcaaagaacacccatagccaaccacatatgccttcaagccaccaataatctattgggtttcaagaggccttggtttagttgcttatttaaaatgctttcatggggatgggactgtaactccattggtagagtttggttatcatgcccaaaaccttgggtttgatccaagacaccatataaacctgatgtggtgatgtaagccttctgttccaggactggggaagtggaggtaggagtatcagaagttcaaggtcattctatctatagagtgagttacagggcatgctgggctacataagaccctgtctaaaatattgcctttgttaccttaatcgtcaggaagatgtcccacagtaaggcggtggctacaagagaaagcattgcacactttgtggtgttttggatttggagtgtgtggcttagattccaggtttgattgacacagaaacacatctgccctacggagctcaggagctacccctggttctgagaagcctttcacccttctctttgattccccccccctcacctgaagtgatcccttctctatttagcttgttgctgctgttcatagcttagtttccaacatttaacaaattgataggttagcttcacaccaacctggggggctgcagacaattcctgtcctatgtgagttcatatccagaggaccttcttggttcccagattagcaaatgccacacccttctactgtccctttagtctgatctgaagtgactccaggatccatcaacacaggcacaccatggagccctgcagctctttgatccacaagccatgtttgagggctctggctcctcaccactcctttccacacacaaccaacaccaaccctaagagagccaactaatccactaaggccacagttgggctacttccagtatgttggctcaggcagcctagttgtcagtgaccccctgctgactccagcagaggaaagctaagacaattgttgaataaagaataaattgctggatgatagccaagagacgttcctttacttaagcaacccttgatccaaaagcccacaagagctcatatcaccctaaggtttcaacaagttaagagagacatctacgggaagcaatatgcctttttagggcttttccacacattatcaatattttaatttgactattgacttcaaacaggaatgggtcaacagacatgattttctgtatgagctaaatagagggaattcagtgtcaaatgacagtggaaacaaacggcaggagtcattctgagtcacgaacagcatgtgctgagcattcctgacatggacacagagagttcctgcagggcccagaaaatggatgcaggagaaaccactgcaatagcaaacccagagaaagacagccaggcacccagcctgacatctgctttgctcgtgggtcttgagatatttgtgctgtctgcttcggacctaccttgtgacctcgggaaacagccaaattggaacagcacgagccacaccccagcagaatgcccctatttcaatacctccacttttacttcagcacgtatgaaaagtagccattggtgcctatgcaacatttttcaacctaagcttttaacctcaaagtactctcatctttcagagaaaatatgcaaaattgtttttgtcttatctctcacacaaaagagaacttgagcagatatttgggcacctgacttcctctgaaggaagtgggcggtgaagttaatgctctcacatctcaattgtcacagttagcaatgaccacgaaagaacacagaaaaccccataacgtggctttctggtgccatcaatgttttgacacttgtcccaagagtatctcaggaagatgggtttcctgccataagccacaggctctctctcagtcaaatgactccctcagactgggtcacacatccgggagacttcattctccagataatcacacccaagtccatggcctcagtgtccacctgcaccgtcaccatggtgtcaaggaacttcctttctgtccctgcctgctcatcctccgaaaccctaccccttcaaacgaacaacgccaaactaaattcctttgcccctaactcttccttcatcccggtaatcaccacctaagcaaagaatataattagctctcaaggggcccctggttagaaatctgggatcatctttgtctgcttttcattcccatctcatcaccaaactggctaagtggaaattcctagaaggcctcaacttaccgctcgcctgcatgctgctgcctccacagccagggccaggttcacctaccctctgatgcccacagccatgttaatggatttagcatcccccactttacatggtcccctcacacttcaccccggcctccttctacccctgtaatgattgtaataaaacacacgatgacatcatctcccctttttcaaacttcaattctaaagcccccatgttgtgttggtcgtgtatttgtacagttatttctccaccagactctcagctgtgtgagagaaaaatattcttttggcttttaagaccttaaattgttagcacaatacttattactcaggaatctcacaagaactacttgtgaaatgaatgaatgaatgagtgaatgaatgacaaagacgcaatctaggctaaagcagttaagtaacaaatttattctgtgcccatcactcgtttgcttttttataaatgagtctctgctaatatgcatcttacatgttctcccaaagtctcaggaactaaggctttggcccccagagtgctactatacctttaagagatgggatctaatgagaggtctttgggaaatttgagcaggtctttgaaagggaccctggccccttcctacctcttatttcctggtggggaagtgatccgttttactctgacatgagctctccaccattgccacctgataccctcaccagagagctgaaagcagttgcccacctgaccatgaactgaaatctatgagaccaaatatacttctaattttatgttggtcatctcaggtgtttgctctagtgatggccagctgactgaagggacactgaatctcaggctcagcttcccagtcagaacagctgcgcctagctaaagagccacgtgtggtcacctgctttcactgctccttaatattagaatagattctttggcctccgttaaccttttcatctcttccctaaatttccaaaagagtaacatttacataaaaagcactaaaaccattgttctctagtcatcagtacatctgagaaattctgaactagtattcattccatttgtggttcactgaggctggccccctagcaagaagactctcgatggatgaggagggacgggtaatgagggctattgaatctgcagggctcagtcaagaaaacactggccaggcaaccagtgctgcttttggatgctcctggttgctttctgagtttcagcctctgaggggtaggttgcttagcaataaatgctaatgccactgttgagggcagggtgattttgtgcattattttagccaaaagagtgctttgcgtgtgttcctccaaagcctctgggtctgtgatgaaggcaacagctggagtcagcatccagcatgtgttgtacaaattcctggtgatgtttgctcctggtttattattctagaggcctctagcgacaggctgcacaagatttaagcagttcttcaaaggcagtttctttccactttgttcctaaagtttctccctccataaacaactgtccctagaggcctggaatagaagatggggccctgagaatcaaatgttttattttgcacagcaggcagcctcccagatcaaggggtttaccttcacactctggagattcccccctggcctagggtttgcattcccaccctgacacctttcccgttgagtggcctttcaccctgggtgttctttacagctactctgctccctaaaacaggtgtccttattaatgagtcttctgaaggcaaattgcaagactgaaagcatataaatcaatagatagcaaaccttaggtataacagaaccagtgacaactgtttattcccattagagtccaaatatttggatacaactgtctctcagagaagtgaggtttctactttgagagagtgtagccatagcctgtgagcaagggcagtttaaacactagtgggggactccccacccccaaacacttctggggtttttttatgtcctttccagcttcctgagtttccatgtcattttccccagaggtttgatggtggaggtttgaaagcagaggctttgtgagatctaaagaggacattgcccagggtccccttcaacctcttagtatgttggatctactcatcaagaatcaatggagaaagctcaagtcagtatcctttattctggctgtttgaggaattcccagaccacagacaatggctgtgtctacccctggagaggagccaggaaacaaattagagtgttgggcaaagtcatgacgtgtcactgttctttgcaggaagggtaccagcctcaagggctctgccatcctcactgatgcaatgtgtgaactgaagttagtccctcagtgggtccctctgattggcaggggacacattctccacagcgagaagcctatgtgagagagcctgctcacagttctacttcattagcgtacaatatcaatggaaatgtctggctgcctttcctggacccaggattcgtcaccattgtaagtctgttctgtgagccagtagcacttccccagtaatgaagatcacacattggtgtgcacatgaatgtgaaccctggtgtgagagagaaagaaaaaaaaaaaaaaaggaaaggcatgccaggtaatgagctcagaaagaccaagggaaaaaccccaccggagggagaaatattaatgtcagagcaaagttgttttacataagacaccaaattaggcagagatgtcacgattgggcccaggctgcgtgattcttccctggaccactgcagagatgtggacctcttgagcaagtgcggttaagcaagtgtgttcagctcaacggtactaagggtgggtggcaagcaattaataggacatgaaaaggtgctgtagataagagtgtcctgctcaaacacacatgcatgttctccgcctctcactgtggaacatcacatgcctctcctgttactgcaactgagccagtgccaacaccatgctcttgaatatcccaaagtgcacccagagacaggggtgaggaaaacacagtgacgaagttaaatacctaaaacagagcagttctgtcaaaacatgaggtgtccaccagagtgcagaggaggaaagatgccctgtcctggatcctagaaaccagatggcaccacgtgtcatcattcctgcacgtgtgtttgtggtgtcagtgctgtgtggtcataatgcacgggcacaggtagagagagagtgctcacgtatgtgtgtgtgtgtgtgtgtgtacttgtaggcagagattaatattggttatcttccttgctcacactctacattacatactgaggcagagcagggtctcccctgaactcggaactccccaattcatctaccttgttagccagtgtgatctactgatctcccatgtatttggatacaggcagggtaccatagctgccatcattcatgtaggtgctgtggatacaaactctagtcctcatgcttatgcagcaaaccactgagccaccccagccctcaaaacatgattttgaaaagttcatgaattatctgaaagctaagcaagttatttctcatcaggatcacagggagagatactctgtcaaggtcatgggctttccaattagctaccatgacagttccacaggttctttccaaattttttggaggagtgtgggaggctcaggccctggctctaccactcagtacccataaccaggaaccattgtttggttcttttttttttaaacctaaacatactttagcgccccccccataagaatgtgaacttatatcatacctattttatttggtaaggataaaatgtgatgtatatgtaacattttagcacagtccttgacttgctaataagtggcagtagttattactagtgttaggtaagacacagtagctctttccattatggttactctgtgtatctaacacaccctggtataggcttcatacttcagatggtagcggcgtcagtggcaagggtggtgataatgctgggaattaccttacagattactttatccagaagaactgagcatgtgtttttataacaacagagagaagagatatagatatagatatagatatagatatatgatctcaggtacgcacctctatagctggagaagttgacaacttaagaacttgcatttcttgggctgctccctaaatggctcctagtttcttctctattttaaaaggttcaactaaccaacaagttgttagtttccatggcagctgagcctatgattttcactggaatgggcccactgaaagtggaccttatactcccctcaaggggagtcatttgggctggcagggatggctcagtagataaagtgtttccttgtacaagattgaggacctatgctgggcgttggtggcgcactcctttaatcccagcactcgggaggcagaggcaggcggatctctgtgagttcgaggccagcctggtctccagagcgagtgccaggataggctccaaagccacagagaaaccctgtcttgaaaaaccaaaaaaagaaaggaagaaaggaaggaaggaaggaaggaaggaaggaaggaaggaaggaaggaaggaagaaagaaagaaagaaagaaagaaagaaagaaagaaagaaaagattgaggacttgatttcgaatccccagcacccgtaaagagccaggagcagcagctcacatctgtaacctggctctaggggcatctagatgggtggattccaggggactctctggcctccaggtgcagtaaacaaggcagagtaacactggatgatactcaacagtgacctctggcctcacatgcacatgcagaggcccatgcagatgaaattgcacacacacacacacacacacacacacacacacacacacacacacacaccatgagtgatgctaactaggcactctgctagatgtgcagtgtgatgaacagctgactagtgtctcccccgagctgaccatctccaccaaggacgggtaaaaagaggaagatgactccatgttagcattgctaacttcacacctaagactctttttccagttaatacattccctgggaaaacaggttcaattcacagctatgtttacagcctccgataaggaagcatactcctgccatattaccaaaccgcttcccatacatccaagttcacagttacggcacaaacctgaaccctgaactttgaaatacaaggataatcaagattctggtgtgacatactaggctcttttgctttccaattgctgacgttcatgaactccacaagcatgtccctgtgcaggccgcaggccaccagctcgggcaggaatgaaatacaccggttctgtgggaagttctagctgtgtagggctgtttagaatccgttaactaactacgcaactccctttaattgagtttatatgtatgaaacgctgtcaatgtactcagctgcattttcctggatttactacaaaatgtgaaattcttaaaatgtagttatgggatttttaaagaacaaaaggctgaaaagttctgttctgaactatcccagagcaaattttactgcttcaacagttccccaagatgcttgtggcccggggctccaggcctcacctaactgctgagactgactgtcagaccccgccctgcctgctcagggatctccttgtagggtcagcagggactccctctgtcccacggaagtccttgcaaccctcttccaccacaccctttctctgtctgtaccctgctctggtaaccgttcctacctgcccttgagaccatgggacacgttgggagggtaaagggtttgctcattattgtcactggggatggctttgtgggtgtgtgcacttctgtccaaacataccaaagtggacattttaaatgtttgcccttgctcacttacatagtcatcaagcaaacacacacacacacacacacacacacacacacacacacacacacacacaccccttgctcattcatggagggcacagcgtcagtctgttccgagtcatgggacttggcaaacacttccttatgagagaggtgcgtgttctatcgtcagaatcacagcaaattcccaggaggcagaaagcgtgtcatgatgtttcatctcgagggtaacctccattcttgcctcccggagtctgttctcaagatggtaaccaggctgagacatttcagtgtcctgacaggacaggagggcttgtcgggcccccacatccttttaatcccctctgtcaagatgctgctccaccataccccctgcctgagaaacccctaagcaggcaggccacgccttcccttagttgcccggtgggtatgtggtggaatcttggaagaggggctctggaatccatgagctaaggagcactctaggaggtcacagaggaatgggagggaagggagacagacatgacaagaggagaagggacacctgactcattggttcatgtgtgtgaccttagttgtgggctgaacagaagtagatgagaaacccctgtcctcccaagtgactgtgtctcccatgagaaacttagtgtaggtgaccattcttcaccatgagtatcccaggtatgataagtggttcttgagttacagctcaaaggctaaagacagaatcatgtcatacaagactttctcactgggttccctctggctgtcagtggtgctcagagacccaggagacaatttaaaaaaccattcagttggttcgttttgttttctgtcataactgggaaggggtaatgacagctagcggttagaggtaaggatgctgttacaaagattgcaccttccccctgacctttaataaataattatctaccccaactaactctatgccatggcagaaaccataacctttacccactcagaggatccctcctcatgactctcaatagagaaatgtctcttgcgtgggtaatgaggctggtattttatacacagacacacagccaagctcttcccttccttagtttcccttggtcataaacactaaacactaaatggcttattcctttaatgttctacctcaactgaagctgacagtgagctgggccgggagggtgtgtgacatccttcacactacttagaaacaacacatgccagtggaggtcacctcctgggccacttgtcccagcatccattcttccctctaactagcattatagacatcacccttcctggtgacaatggcatggctcagaaagtcgccagctgtttctcagcaagcatgcaatggaaaggacttgtggccctagttcttgatgacttgaaaatgtgaatctggtgcatggctttgaggactgcttctggaggctgtcatttacatctgcctcttggctggtgttgcaatggggacaactgagatgacttcgtctctaaagtcatttcaaagctctggtcagacttcacatcatgacaactgtgcagtttcctttctggataaagaaaaccagcaccacaagaagacaaagtcatctgaagatataatttggtgcaattacagaagagaccaaggatttctttgttctttcaaaaaaccacatttacgtagctttaccaggcctgtactggctttggtttatatggtgagggaagtcacaaagactttgacctaaatgcccaaggctgaaggaaacctttagagatcagggctaagctccacattcgtgtgtgtgtgtgtgtgtgtgtgtgtgtgtgtgtgtgtgtgtgtgtgtgtgctcacatgagtattatagatgtacgtgtcactcacatgtggggaccaaaggcatctttcccaaacactttctactttgtgtttttgagagagggtctcactgaacctaatgctcatctatttggcctgtgagccccggagatctgcctgtctccacctccccaggggtagcaattacagactgtgctgttacaacagcttttacatggttgctggaaacctgaactcaggtctagatgcatggcaagcaccttccccattgatctccccagcccttactgaacatttttatttctatcctggacacactagaaatggctccgcacatcctcgagtagaagtgagaccatcccgtcaaaatctggtacaggatgtctattctcaaactaacaacttctagacctacttgtgatgccccagtttaaaccttcatcaccaaactcttgcttacttatttggggaagaagaaatacataaatcctgggaaaccccaacctctcaccctttgtggggaggggatgaagtcatgagttaatgtgtattgctgatatggacacagccatgtcaagaactccagtgtctcagacccatgtaaacagcaaaacctctctctggcccaagtgctgggataatgaacaattgagcagtgtgtgcaactagcaatctctgcttcctccttttgagactgttctcctccagagatgtcccacggagactagctactccccacgtgctgtacataataaatgcactgcatgataggtgctttccataaaaacaagcacagctccccaccccatgccagcttctctgggtgtgtggtagttgtcatttcttcatccctacattacactagtcaagtttacaatgcaagccacaatggatttggtgaccttccttttcccatattgagatttaggggaaaggtctggctgaaagttaagcttttcaaacaggaagaaaacttggtcttttcccatacctgcctctatcatacttctggtttgatcttgagaaaaggaactataaaatacttataaagtgatttgtacggtctaatgaaaaaatctagatcatgaaactcagccctgagtattttctaggtaaccatatcggacaaaataagagtgggagaataataccagagaagatgttcttcattaggttttgcttttgacttctgattatgggtttatcaatgccatttgagaatcttgctgtgagcctgatttggcctgtccacattaactatcaatcagaagaagggaaaagcttaaaggtgacatcctgtatgtgaccacagtcctaaactctataacagtattgtgcaatgcagagctttccaataaagtgggtggagctttgccaaggcagtctagtcattattcagcttattcgctcacttatctcttcatccaacagtgtcattcattccttgaatatttattgtttacttgtgaattcctttggtacatactagaaagctaatgtagccctgacctttacagatactgtaaaacacacaacaattaaagattcaagagtaaaacagcctgtcctcttcgtgtggagactcagtgaacagctctgcatttcgttctaaatgctcaggtttagtttaaaaatataagctttgctattttctaattttatcaccatagcaagtcatttaatctttgttttacttttcctttttttttttttttttttttttttttttttttttttttgaggagtagaggttgagacatgacatggctctgtgtagcctctgctgtcctgcaactcactctgtagaccaggctggcctcgtgctgggattaaagcatgcactgtgaccgcccagccttttccatgtttcaagtgtatgtgtagtgtgtgtgtgtatctgtgggcatgttgtgatgtgtgtggacacacatatgggcacccatgaggaagccagaggttgctatcaggagtcgtctccaactgctcttaaaccccattagctgaagcagtctcccactcaaatccagagctcaacaacacggctagactcactagccagtctgtcctggggatcctgttcccctttctaaggctgggattatatttaggccagcacagccacccagcatttacatgagttctgggactctgaatcctagcctcagacttgtacagcaaaccctttaactactgaactatctatctcccaaggcctcatgtcactcagtctcttgaggctaaatttccttatcagacaggcaagtagactattcctcgctgggtatttacatgagaacgtaaaagaatcacagacacacaaaagcactttacggcgagccctgaaaacacagcattcaagtcttacacatgccaagtttttcctgtgcttaatgtgtgaaaaagcatagctgggacataagccaggccctatcagagtgtctcagttcatagctagcagttcaagcctaagcttcgaaagacgtgacacaaagaagaacaaagaggacaatccaggtaaactttcaagtatgaagggccaagatgaaagtgccacgaccaatgcaatgtccgtctccacttcctgacccttgtccaggctgaggcggactttcagatgggtcacaacacacaaacagcaccatggctcatgtgctgcctggtttccattagttgccatgtcataatactgcgcacactcacaaaacacttgtaaaagtcactttcttgcctctgcctctcgctgctgtggtggccagacagatgaatggaactttccagaaaaacaaaccaacagtctcctgccatccaaatgtctgcaataagcccacttaagagacaagccaagagaataaatggcctagagatggctacttagttgcaactcggataactcaaacacagatgctctggaatctcagacaagctcaaaagctgcaggctagaggagatgctcccaccaaacagaggcctgcctaaccagcagtttttctcaggcctaagtgccttgtggcatgcagaacaatagcacatgtctagagcaccaggacatttacatctggaagagagctcagccaaagtcttgtctgggctttgatggttccagggcatgcatgtggatctaaccatgaccaacatcaggaaagtggccggcattcttggcacagaaacaccagtccatagactagagaaacactacagcttagggtgagagtgtaacccaccatattcttatagatgactagcagtttctatggtctgaggcacggcaggcttcagagtggcctttaccgctgtctccccatagctgggaagccacatgaggagctacttccaagtgcttcctggccttgtctatccggaggtggctggggatctctgggaacatcttctataaagaaaatgactcttaatgtggcaagatcttacattcaacgactctgcagtgcccagggtgttccagttacacaggacacatgtctggacagactgaggtggcaactgacctggacttactgtgtccaccgatccagcagcaccaggccatctgactccacagcctctgccagaatcccctatcctttagggaaagattgtggcaattatatacaaactgtactcatggctgtctacccacaatagcagggccaagaggtggcccacaagactttaaaactgttcctagacaaagcctttgggagtctgactctggaaagcggtttctcatgaagttccctactgaattttcacaaaagcttagtctcaaaggacttcatttttgtgttcgttaagcttcaaatacagttatattcaatattaattctattgtgtttgagaactgaaaacacggcccagctgtgacagtggcttgattcattccagatcttcccccccattattatttacaagcagaattttagttgctgcttttgcaaatagtataacctgatttattaactgagccaggccattttttctgaaaagctaattcattaatccagtattattgaggcattattaaaaaacctttagactcttggcaattactatcacagtgaatttttgttgttttcttttatttctattaaacgcctcaacattaatgagttctgtgtatttcaaaggtttggggaagtagtaaaatgggattattgatgttttcctcctcaaaatacaacggtcctttagccagaccataacttgttactattatttaaaccatttctatttacaaccatcaactgaaaacatgttgtaaaatcctctggaatcttttattacaagtttaggtgcattttttatgtgtctgaaaatttaagaagggaggaaatatgattcacttacatattcattattttattccatctctaaatgggaatgaatttacaatcaaagaaaaaaattaagcctaactaagctcatggagttttggaagcatatgaccatgcattcctgtggtgataaatccatgcaacattatgaaaatgaatgtattgagctccagaaatgatggtgggccagcaaacaaaaccaaacatgctaccatggagtaaatgagcgggatgacacagcccatgtgacatatggaaaacaataagacaggacagaagaaagggggctttgggaatccagagtaagggactttctcacaagcggtacaggcggcctctctgctaacggatgcttgagaggcctgaaagaagtgagcaaactacagcaagcaccgtgaagaagcagtcctggcagggtagtgggtccattccaagtcactgtgattgagaacagcgaggagccagcttggctacagtggggaaaagaaagaaggaaagagtagaaaatgaggcccccccagactgctgtcacagaaccagtgtccccagaatccattaagttgacatttaggtgatgacactataaccttggacctctgcaaagtggtcaggacccaagagcactaggactaatctttgtaagaggccttagagagctcctgtgcccttccatcatgggaggacacaatgagaagatgacaaaatgacacaggacaaaatctgcctgtgcctggatcttcgacttcccagtgcccagatctatgaaaataaacgtcagggctgtggtattacatcaatgcagcacaaatgaaccactaggctatttaggaaaaaaaatgggatagagatataattgaggaaatcaatgataaaagtactaaagtatggaatgggtagggtcacactgagtgtaaaggagaaacctaagttgaagatcaagccctccacagttggcttagaatagatacacatgataataataaaactttaagttgggagttaataatgtttttatattccaataggaagacaagtgctgatcttcttgcttccaaataaattcagtttttaatcaagagccattctctctgttcctttcaactgacaggacaacggtggaaaagcagacaccaaatttagtggtcaagggcatgggagaaaacagatgtgacccgagcagttagagagtgaatatcaaaggcccttgcagaaaagaggccaaaggcatggaggctttctcagataatggaatgtgcattccacgctcagtcacagtgaactgctagggtgtagagagcagatgaggactgacccagtctccagcttcctgtgacaagaggcacagacaaggataaaaggcttgctgttctgggttctgacatttcccagacaactgtcagtcgaggctaaaaggtggcaggagggaggacaggggtccctggcaggaatgagctctgggttccatcttcacacatgctggaggcccggtggacaaagagtgaaggccccggactgccagacccaaggtaattgccttgagcctcttttcccttgagtcaacagccaacaaatgacattcagagaaatgtcaatggtcaaaggctggctgtcctagtttacttttccccttcctgtgataaaacatgtccaccagaaacaccttagaggaggaaagggtttatttgacttacattttcaggtcacacaatccatcattgggggaagtcaggccaagaactcaaacagaagccatggaggaatactgattactggcttgctccctggctagctcacctagctttcttaggtggcccaggaccatctatctagggataggactgcccacagtgggcacgagcctcctccattaattaataattaatcaaaacaatggcacaaacatgcccagggaccaatctgatctagacaactcctcagttaatggtcccccttcctgggtgactttaggtcatatcaggttaataataaaaactagtatatggggagaaaaaactagcattctgagccaaaaagcccaagagagcataaaacttacttcggctattaaagaaacacaaacacacatacacacacacacacacacacacacacacacacacacacacacgcacgcacgcacgcacgccatctccatgcttaaagacacaatgcagtggactatttcttccagaattagccaacagtacatcggatggaggtggggatgtgtatgaaaggggcagaactcccacttcttacatggagtgacagacagacagacatgaaggttataaaaaggtttgtccagcacattgccaacacagccaacctcaagacaacttatctggatcctgatagattttcaggcattgagaaccagttcaccatccacaggcctaccctaatatgtaataggctgactttaaaggggggtgagaatgcctcttttcaggtaaattgtacacagaagtgcaggggaagcaagctttggacgggagggaagggaaaggtgggggaggaggagatccagactgagtaggccagagccagagccctacttggatccaagaacagaccccatgaaggaaacccttggtgcccacggcattgctgtggggcactggccaggcactgcctatgggccttgttgggttttagccttgctaccctcagtgatagctaggatagcaaaacaaagtctttgtttgttcttgcaaccctaccgcctaaaaccaaacccacttccacctgtcccccttcacaggtggaaggctgctcatctgtgactactaagtcaacatctcatgcccaaatacgagggggaaaaattgtgtttaagtgacaagggtgatatctatttacccataacctacggatgggagtgggaatgtaaagtttaaggaggaggggcccagagaggtttctcagttgataaagcactcaaactttggacctggttcagaccctcagcgcccatttgaaaggcagcctcctcagcagcacacatctgcagtcccggccctggagaggtgcaaacagacaggtccctggagctcattggtcagctcgtctagctgagttggtgagccccaggttcggtgagaccttgtctcagaaaagagggtggaaagaggcagaggaagacaccaacatcaacctgtagcctccagcatgtgtgaacacacatccacacagacatgtatacacacagagagagacagacagagagacagagggacagagggacagagagacttggagagaggaatgaaaagtctcttctcatttcgcatcagttgtcatttcactgatttggacacgggcccgacccgtttcagcccagtcatctcagactctcagctcaaacaccaagcagagttcaccacttcccatgggatagacagatcagaggggaagccttaaacattttcaacagttcttgtgtattaaagatattaactagctccagtcttacacctcactgtcttctgcagcacatcacaccaagtagctcagacactcaagagccccaaggaagctgtattcagactccagcataaacaaactcagagcagagtcagacacctgggacgtgtagttttggtttgttcctttcccagagagacattaatctaaatgcttcgtctctgactgctcttttctaagtccttaaagacagctcatccctcgaattccctctcctcgagcccctgcttcttatgatggcctcagctgcccagctgctagttcgctcaccctctcatccccactccaccaagtctgtggtgctgagtgctaatcttgacaaactgggatgggtagttgagtcttaggggaaaaagtgggagaaggaaggccagtatcagtttgagtggtttcagagaaaagaatattggaagcaaaaaaaaactttaaaaaaaatcatagattaagggctcatcttcaggggaaccccattccttccctgtccatgtcatgttttaaaaacatgtttttaaaagacatgtttgcttgtttgggctctgaggatggaacacaggaccttggacatgctgtgcatgaactctgccggaactacaccaacagcacttacacaacaaaatttttgcaagaacaaaaacatccagaggactgtctgctatttcttggggtccctggattcagaaagccagctaactaactctgatgccatgaagtcttgaattttgtcatcttggtgtgatggctgctggccttaaagaaaaacccacaaaaagacaggaaaccatttacttggttaaagatgtgaaaaatcttacacagtcatgttcagttgcatgcgcgagcacgcacgcgcgcacacacacacacacacacagacacacacacacacacagacacacacacacacacacacacacacacacacacacacacacacacacacgggccatatttagcctcactgcctaccaggggctcagaactaaatactaacagtcaaacagcaaggggccattttcctccctgaccacctggtgtggtctcccaagcacaaattcttattcatcgttcaaatgaaaacaaagactcgctttcaactcagtttggagtcggagaacttgaaaatccagaaccaaagtcaaaaacaaaaaatatcaagatcctgtggtaaaacatctgtgtcctgtaaccatgaaatgaggaggggttcaaagtgcaaagtaacggaaaacgtaaggactagggaccatgtgtccccttctgtccttaccctacctcctggcccactctacctatccaccagttcaataagtgattctcatattacttacatgcttcaaaagatattagattgaatccatatacaatatatgcatgtatggaaataatacagataaaatatggataaaagttaagataaaataaaaaaggagaatcctctcaacatggaaactatagtctcctgtgatgaatcaagtttgttaacaagtctttttgtccctgtgattttgtttttctacagtcccaagacttcattgtctctgaaggccacattttattgttgttgctaagccctcagctttgcaactaaagttcacaggaatgatatatattaaacaaaattgcttattctaatttgctttctgttgctgcaataaaacactaacaaaaacctacttgggcaagaaaaggtttatttggcttacagtttacagtccacctttcagggaaaccaaggcaggaacctggaagcaggaactgaagcagagccatggaggagctctgctggcttgttcctcgtgacttgcttactcaggattacctgaccataacgggttgggccttccatcaatcattgggcaagaaaatgccctgcagatttgcccatgggtcaatctgataaaagcaattcctcagttcatgtcccctcttctgaggtgactaacttgtggcaagatgacaactaagcagcacaaatgtcatggagaaaccttccctccaggagttagaggcttctaactctcatagtcccagctctgaaggacccccaagatgatccccgctgaactctaggagcacccacggtttttagtatacatacagccaaccaggaaaacaagagcatctaagacactggcattggaaagatagacattaaaacagtttaaatatggtgcgccctaaaggaccatgtgttaaaggcctggtccctaacccagggcactgctgagacatggagtatgttttaggaaacaaggccttgttggggagacttagaccactggggctgtggccttggaaggaaatgttggatctggggtcctcccaccctctttgctgcatagccatcagggactaaagcagcctcttcaggtacataaccccacaatggtgtgctgtttcacaataccaaagcaatggagccatcagatcacagcctaccacctccaaggctgtgagccatatgaacctttctgctttattagttgatgatctcaggttatttgttactacgacagaaagctgacaaacaagaccctgaataaaataaataaaccagggaaagggggtgagtcttgtccatcccacctcctgagaatatctcaagtccacactgtgctcccactactgtccccactcaaggccgaagccacggcctcctgtctcctggataactacacacatctctgcactctagctttcctctaaccattcagtgtgggcagttggcatggagttttagaactttgagatttccactgcttagcttcagttccttctgctagcacattccctgtgaccttgccacagccatcccccttacctccccaggcaccattctccactcctgccttctaccctcatgccctctccacgtttccttcagttcttggctggaatatcacactgtcggagaaatttcccaccttcagacaaggacagctccatgtctcacatttctgtcaatacgctgaatatatcttttggtatacacaacacaatggtgactataaagctgactgcatgaccagttgctaaatgtcttccattcattgaaggtaaactctgtgggagcaggaccttacctgtctcacttctatgcactccgaggacctagtgaggagccctacaggacacaggatcagtctttcttacctacacttggtgggattgtaatggccctttggagccaatgggggaaccaaggaaggctcatttgcatggagccattcaggacaaagaggtggagatggttggaggctggaggtgcatttccattcaagcatactctgctggcacattttgtcacccccagttctctggcaagaacagcatcaaagaacggaagattcctcttaccctacagccagactggtggaaagagaatcccagaaggtagagagactggccacccctggggtctgtgatcaggacagaggcctgggcattgggtcttgatgttctagaccttgccgatggctggaacaattccacatatcagataaacccaaggggctgggactgtcataatctatcctcagtaagtctatggcacacataccaactgacaaatgtcaagataaaattcctcaaaatgaaccaatcttcttgtattaaaaaaaaacaattactgcacaactttgtaaatttgttaaatactgctgagttgttaagtgtcaatttcatggcatatgagctatatccccaaaataagggggtggggctggagagttaagagcactggcattcttccagaggacctgggtttgattcctagcacccacatggaggttcacaaccagccgtaactccagttctaaatgatctgatgccctcttctgcctcccacagacactgtacacacacagtacacacactcaagcaggcaaaatattctaactcttaaaattataaaaataaaaataagaacaaaaatgaaaaagtttttccttcccaaccctaaatcatgtttactttgacagtaacagacacttgccctcgttactgatcacctctaaagtctgctttccacaatgaatgttaactcctgttccttgaaaattcagaggacacagtgaaggatgacaccggctgagcaaggagcatactggagccagggccattataacctgacacaaagtggcattggtcacattagtatagaataagacagcacagcgtccatggctgaggacgctttcaccactaatgaaggagaccagaagaataacctgaaaatgaaattctacccaatgaagcgaatagtatttttcacctttgcagtcaacttccagaactatttaaaattcccatgggaccttgtgtagtctgggctacatgctcaccgaatccttcacattgattcacaatgcaaggccatccatcttgtgaaagtgtaagctttgggtacaatcgattggacacccttaagataccactgtgggacggcacctgtgcactgatgtctcaaaggaagctgaattcctccataatgtcttttcagaggttacaacaagcttcccctgtcatcagcagagtgccacaagaagaatgataactagctccacccagactcctccagagctatgtttcagaagtgagagaatgcaaggcccaacagttaattgtgggtacatgtggacaaggatcaaggcacatgtaggtagaagccaacctccaagtagcacccagcatctacatcaacgactggctatctttagccatatagggccaaacagcaaacacattgctttgtcaactgtatagtttctgatatagtaaatggattttgctggcaggaaaaagaaagctgccacaggtgaatatgtaaatcaatgagtacagttgcttctattaaactatatttataaaaataagaagtgggctaggtttggcccccaggaccacggccatacctctctgtctcctgctgtggataatgcaaatctatgttcttcaaaaagtaattactcaaatagtttcttaagagtcagaggaaccctcctgaagctttagcggcagcctcatctgataaattatagaagagaatttaagctttagatgattcactgttaccctgatttccaagacacagtaaagcgccaaaggctgttttccctgaaccaagcagttccagatggctatcctctgagggttcatgtctgctttttgtctttgttcttcccgagaagctattaacggtcactttgttcgtttgtctggttgactgtttccgtctttaatatgccatttctgacctgctttgagataagagcagcatctaaagtgaccagattgcaaatgatgacaagtcaagaaacacaaatgtgagacttaccacctctacagagctgcttcatggacttctgtactatgtaattccttggttactttacatacttaaagttaatccatcaatggcttattggctggggaactagctcagtaaggctgcttgctatgaaagcaagaggacctgagttcaaatctccagcatgcatcaaggggtggggcatgggccgtgcatgcctgtaaccctatcatttcagggaggagactggcagatttgagaggttcactggccagctagcccgcccaaaacagagagagcttcaaatttagtcagagactctgtctcaaacactaaagtgaagagcaataaagaaagacattcaacacgctcttctggcctcaacatgagcacacactggtgcatgcactagcacacacacacaaacacactcgcacacacatgcacatgtatgcacacacatgcacacgaacacacatatacacatgtgcacacatgcacacacattcatacatgtgcacacatgtacacacacacacacacacacacacacgtacatgcacacacatgcatgcacacacatgcatgcacacatacacacaggaataggcacatgcacacactaaattttttaaaagttatttatgtttaagggaccactttatgagttgagcagtggtacgcactttcaatcccagcactccgggaggcagagacaggcaggtctctgtgagtccaaggccagactggtctgtagaacaaaaccctgtctcaaaaaaccaacaacaaaccaagagaccactctatgggcatgtgtgcacctatacacacatagtcattttctccttcagtaaatattgaattcttaaacatcagtcactgttagaagagtttgcaacacatcagtgaacacaagattagaaagtaaaccacaaacaaacaagcaaacaaagcagccaacacagagctgacatcatcacaaacacacaatgaaaccagtgtaatcatttttgccctgaaggagaaatggatctaaattagtaaacacagctcttaacaaagctcatgtatgtgcactcacatatgtgagtacacacacacacacacacacacacacacacacacacacacacacacacacctcttcctaagtacttccaggtcaccaggttaaatgacagtttacaaaagctgccctcccatccacactccccgacccccaaagcagttctacttaataaaccagagtgcccactcactccagtttgctctttgtttttcatttcctgcctctttgctccccatggtgacccccagggaaacaggggtaagagacaaactggacagaatgcagggggcccagtagactgttagattccaagtggtcagctttaaaaactgcttgttcaactgttaatgaagctataaattcctgtgatctggcaggcgaaccaaaaatcctagcctggttccagtctcgtttgaaacagactcattaacaaggtgttgtctttccggccaatgaagttggatttgcagtccctgagctcttggggactcctgggctatcagcagtgttccagagagaaaagaaccaagcatggagaactgcaaagttgtgaggacagaaaaagaaacgaccaaacctagaggaagaagctcccacagaaatgtcacggtatggagctaggaaaagaagacccgatgttacaaagacaacattgcccctccagtgcctctggtaaggggtgcccatttgtgagtagacaataccacagccctcccagagcaaaccaatggtgtgatggccttcaccatgtggccagatctgccacgaaacagtgaggctggcagtgaaaggttcaggcattatgctggcctgcccctgttacctggtggaatccactcaggcaataccctggtcagcccaaagttccatgggaaagaagtctgcacgcaggtgcagaggacccctttaaaagataggcccctgcacctttacgctctctgtttctctgtctctctgtctctctgttcctctgtttctctgtcccgctctgttcccgctctctgtcccctctctctgttttccgctctgtctctctatggcaaccggccatggcggtcagccatttacccctgttcctcttcttagtctccccattctgccgggccttataataaacttatagtcaatatgtctgtctcagcaatttctcttttcttctttttaaacaaaacaataacaggcagcacacaccaacagctgtgactcagtgtttgctgtgtacacctagacactacacacaaatatctttggtctccagacatccctgtctgtcccctctctcctgtgtttggtaacagtagatgcaccgcctccagggaacatctggacagaataaagcacaagaggccggcaggacagctctccatgggcagagtgctcttgccctccaggaaatggtggatagagagttccactctgattccctctcaagcttccttccgcagggtccaattccttgccacgctagtgattcatcccaggatcctacagatgccaattcctcaggctaataatatcagcgtcttggttccacctgttggatgtagggagggatagagggaggggacacatgtatgtatgtgtgcacatacatacacagagctctaagcagcggattcaccagatacaggagtctgggaggacacagcaaaatagaaatctaagacagggatcgactacagagggttatggaggaaacctgccacatcttccactaggtcacaacgccaatgattgctagcaagaatcaagccagaaggtggacagtaagccagctgggcaaaaggaaagcagggatagctcatgggttctgggcccggtagtatttaactgttccctactctctcgaaggtaattgaaattgtaggactagcggggtattctgcaagttcagattagttccaagtgtttcatcacacaaccccagcttcaatagttcgtcacacgtgaatggggtctagtggcctagataaccctttcgtgccttccttgtctacattaatgtgattgtggcagcgccatcctcccagtgctacttggcagaagcaaactcacagcagacacttggaaaacattacctttagtgtaactaaaactggtgttggggctcagaaaacttgaggtctctgacgcagtttctctctgaacttcctcctgtctcccagtccaggtctctccggaagtggactatagaaactagaatttctcttccccaggtaggtcttagaaagctgagccccttcccactaaggcagccataaacctaaaaatactactataatccccttcacacacaccccttgcctttctgtgtacataaagccctctgacctattttattttattgtaggttctaatcccctcattccagaggctcctgccccacacatgggatgagaaatgcctcacagaaagacccagaagattgtttgcctccttggtctgtcctatcagctcatgtcctttgtgttcttcatcttcttttcggctgtcaatcttcaatagattccaagcacagaatagggtttggcctggggcctgggatctgaagccttaactccagtttaaatacatctgaagtccagtaaataagctgggtttctctactgttctccagtctcgttgggagatgtcagccaggagcctttgtgcaggaaaggggttagttaccctcttttgctaatcatgctagaacttcttcctattttcgggccccttgcctgcttgacataaacattcctttcttgaaaatggtccttgttctctactatttcttcagggagccaagacctaacctcagatggaggccactgttcagtaggcacccccacccccaccccaccccacccaccacctccctgcctgccatcacttctgtgcaccctggggcttctcacctacatgctgcacaaggagggactaactggtggaattttagtctttcacaagacatctgctttgagggcagtaaagacccaggtggcaatgttttgaagacaaagaaatgaagggcaattaccctgccattaatcagccaggctctagggactgaacagccctagttaggaccaggaaggaaccgtttaacagccttcctgggtatcaggagtgagcgaagcacaagttgagtcagtgggcagtgaagattgctggaaacacatctgtgaatgcgaaagctgctttgaaagaatacaaaatgctagaagcagtttccactgcttcttcagcaaaggaaaaataaaccagtcatcccagacatatacagacatacagagatacacaccgagagacacaaagacacacacacacagacacacacacacacacacacacacacacacacagatacacacatagacacaccgacagacacacagagacacagagacacagacacacacacacacacacacacacacacacagatacacacatagacacaccgacagacacacagagacacatacagagacacagacacacagatacacagacacacacacagacacacacagatacacacacaaatgtcttcctgtgcctcactacatgggaagcagaagacctctgcacttttctactctttattaagtcccaaataaatcccccactccctatgaatttgtaggggtaataattaaattaaagatctggagaagttagatgttaagaatctatgggaaaataaagggagccccagttgtctgggttgtcaatgcataaataacacaaaattttccattttggacatttccaatgatggttcagtggtgttgagcacattcacactgttgtacagtcaccatcacctcccacctccaggcatttttccatcctcccaaacttgagccctggattcattaaacaacggctctccactcctctcctcccctaactcatgaaaaccaccttcccccactctgtcggaacagacccacctactccagctctctcctatcatgagaaccactgtgtccacactttctgtgtttcagatattataccaggatgtctttcaggttcatctgtgttgcagcatgtaaggttcatgtcctctttgggtgaatcttctgatggacacttggctgtttccactttgcctatgacaaataatgctgatgggacctgggttcaccagtgtttgttgggagcccctgtgttacatcaattcagccatcctgtggcttcttgctttcacttgcatgcttgttttcttagttctgaccaactgtctggttattgctacccaatcaaccttttggctcccatgaagttccgtgttggcaccctaccctatgttttgcccctgttctgttgggtttggtttggataaactcacactggatgcacacagtcccctggagagcccactgacaagaacactcccctacagactcacctccattccttactttttgagacagggtctctcactgaacccaaagctcaccatttgagtagactaggtagccagcaagctcccagaatcttcctgtctacccaactctgaggtcacatatacacaccacatttggcttttatgtgagcactggcaatcctggggcttgccaagcaagtgttttacccactgagtcacctctccagcttaagctctgagtttattacaagtaaaaatgtacctataccctatcttagtttagagagcatagctcctgcatttactgagtgaggccctggcttaccccggcattgcactcactcaaagcataaatacttcatcacgttttatgcattatttcattacttcacatcgtataacaacaatatgcagtgattactacacagtgggtgtctgcctctttattatccgtatctatggttttgttgacataaaaccttacagccaaccactgtgtgctccatgagaaataaaagcccttcctttgtagatgtcagtcaagggggaagcctggggctctctggaaaccctgtgtctcttacagactgtcacagagttgtctgccttggatggatggatggatgcaatgtgtgagaaactgtgagtccctcaagatgtcttcaccaaatctcattcttgttgttatggtttgtgtctgaatgtcccccaagggtgcaagcccataaaggcttggtcctcagcttgatattactgggaggtggtggtacctttagtagatgggaattcagggaagaaatatcactgggagtgtgaccctaaagaggacattgagattgtcccctcttctttctttgctcctagaaacctgagttgagcaggcttcctctgccaatggttctcaacgtgatgaactactccaccataagcccaaagcaatgggaccaggtggcagtggactgaaacctgggaccatgaacaatgacaaagcttccccctgcttgccttaggtaccatcaccccaacagaaagctaacatgtctgtgttttcttactgtcttgactcatagagggttttctcgaacactccttggcatttcagtcctcacccgctccacctggggggtcctggtcatgaaaagatggaccccatccacttttcctttccctcctgtgcctaaccctggggtaggggagtatggacctgtgctctacacaaaagacaattctacatggagcctcaggcgcttcagggtgactgacattcattctgaaaactgacagaaacatttatggtgaactcttttgagtcttgttgcctgtgtggatcactagccaggccacgcctgctgtgacatcatctgatgaatttgtaaggcacaaatgagaaagagctgggagcctggacagggcctgcagcagcagagggaaatgagtggtgcgtgaacgcacacagaggatgctatccggcctcttgccttagccattggaaaggaggaagggcaagaactggactgtatcccaccacagagggcatctcactgggtttccagcccctctcccagttcgggtcatcccggtgttttgtctgtgtttgtttcaaattgcacaggagacagtgggatgagcgggtgatgcaaaactacagagaggcgggacagagtgttatgaaaatggcctctgtccttccctttcacatatggatactgatgatgtcactctgactggtgtcactgacgggtggtgggttgacagctctgaaaagcagctgcttccctgaagcctgacaatagaatgaagtccagtcctgagatgaagcctgtggaacaaacctcaatcgttgccgaggaacacattgttggaagcattctccagggacacacacacacacacacacacacacacacacacacacacacaaaggagactatgcagtactggtagagccaatatttctatgagcctatgagtcagctgtgtgttcagtgatggccagatgccctcattttaatccacaacccagtgccttttgcacagaactacaaaatgataagaaagccatgaaaattgttctctaatagattatagtaataagagtgcataccagctcagaaggcacactaacacccaaagcttcgggggagacacaactcccaccacgatcatgagtatcctagcttactcctaggatctctcacctgtcttcacagtgagagacaattgtactgcctgaacccagtgccccatccttgtccagaggaatgccctgcccagacgctgcagtcaacgagtgacgtgccctttcatgctcatgggatcttgagctttataacacagtgatgggagccaccacatccaaagtctctgctaggaggagcctcctatcaggcagcggtcaccaatcatctggccccgctagttaatgtgcaagtcacaccacagacagcatgaattcaggcagacagtgctgaccgcagacatgggcactccatgcgtctcacacacaggtatccaggtaactaataaaaaaggaagtctcccccattaaaaacgcagctactaaccctcacggtcttgactggatctgctagaggtgtatgttcaggaagaaaaaatagtagaaagaagaactccaggggatggtgcagtgggtggtaacggtgcttactgtgcaaccgtgaggatgtgggtatggatctgtggagcccacaaaaactgagtgtggctgctagcacctataacctcatctctgaggggcagagaacagagacagaattgctgaagcttgctggccagacagcctagatggaaagcagcaagctccgggttcagtgagagaccctatctcaaaaaaaatatggaggggaataacagggatgcatatccagatcctcctccggcctccacatacaggcatacacactcacatacatacgcatgaccacacatgtacacaacacaaacacaagagatgggggctcagtggcagagcgcttgcctggcccatctgagcccccggggccaacctgcaacactgaacacaaacaacaacaaaagtctgcagagaaacagattgagctcttacaaaggctcccttagtcccttcccaacaaaatcacttattttttacaattgttgggccgagaatcatcgcaaatgagtaaccgactctccccttgtgccatgtaccaagtgacaaaagaatgactagctaaggtccactgccccaagcaagatccctccctcagcctcctcagctaaacatagctctgtcatcagagtttctcacaggaggacccctgctgctctcacctgtcactctcctgacaggccctgacagggcccagatagtctcctcagcaccactctcccttaaagtgttcattggcatgtctaagataaagatatccccttggtcccaggatagaccattagtgtttgctagaagtcacaagttcttgaggtctgataagacccatgttaccacagaacgtattgcccttgagaaagtatacgtgctcattttatttacattgttctaaagtcataaagtgcaagaaaacacaacagaaaaaatggcttgaagcatgctgatgccctgcagctcttgtggaacacgtgagtggctagcctccctcctggtcagtctaggatccacagccctctgagcccttgtgaggcagaaccatccagtgccggtcatcaagtcgctatttgatgcgtgggaactgtcaccataatggaaacaagaccctttctcagcacacagtattgggagttagaattccttacgtgtcctttagcaaatggtgatttctagagatggctcatagctaatagttaggagaggacagacccaagagaggaaaacgggagagagaaaaaacacaagtaagacagctgatgtgataaccaaatggaatatcaaggcttgcttctgagaaggtttcagattcacattctcaaatgtgtttaatataatgcagggtgggaatggggagaggcagggctgaaggaagaaataagaagggccctaaccagaggcagaatcgccaaacagggaaaggaagcatgggctacagactcctagtttgccagggttggtccaaggcctagaaatcggaatccagcaatatgaatgcacccaccccaccctgccccaccacacccctaccccaccacacctcacacaccaccccctactatataaggcttcagaactcacaaaatgtgcttctgtttctggtctcaactcactgtgttttcccttcagactgtaactagtgaggaaaaaagggaaaaagacaaagggcaatggtaagagaagaaatgacgactcaagggtgactaagaaggcaagaagaggaccctgggcttcttggggcctgttcttaatctgcaaagaaagaaattggactgaaattagccaaagatgatttccaagtcactttccagttctagaatactttgtgactacagaccaatgtctcgatttgccaaaccctgaatgtgattctgaagatagagtaaggcctgctatatccatggaaacccaaaggctgtccccaatcatctctgtgagaagtgtgtgccctgaaagccgattgtcccccatccccaccagctgaccctcttggtgccaagcccactgccaaagctttggcacacattcaggcttttcttggcctctccctaaaagtcaacatttccaagcactccagggccccaggaactgaaaaagaaaatggcccagaacctgtgtttgatggctctggcataaatctgacagccgttggaatttgagtctctgggctaaggcgggggtaactacctgggtgggaagaaataaaggccatttcactggatttgagagaagcagaacaaattcaccactgtccacaaatgctgtctttgctaatgaacaccaaataatccacctactaaatcattttagtgccatttctgttggaatattctaacggcttgtttgctttctaaacataacacggttgtggcaataaaaacaaagttgagagataaactctactgcttgatggcattccgtttacctttggaaaacatcagttagatttactgcaagccagctaaatgtgcatgcctcactccgagggaaatggcactcagtagatctcatccggcctttgtcatctttattgcaactgtttctgcttctgagaggggagaggtgggctgtgctccagtccagctcagactgaaatcctgcttaccatggtttacattatttgaagtctttcttttgtctctggttgactatgatactcaagcgatgggctgcagaggccctggtctccgggtaattttaagacatagaagctactgctcaagcctgcaacagcaatgctgggttgcaaacctccaccacgacctgtatcatgcacactctgcctgcctgacacacagcaagctgtgcaaatattccctgtgctgacccaaagttcatgctgctgtaatcagagacagatgaaatggttcttaagctatattcgatatatgagcaagagggagccatgggtgaatccctggttatctgatccttggttatttgtttgaacacagttcttggctctagtctaaaaataatacaaaagttttaaatgtttatgatcatttttgtcaccttaggagcttctggtcattataggcatccaccagccaaacaacagaaaattcaataactaaataccaaggaagtgggtgtcagtgttgctcatcaattgctatacgattctttgttccctggccattcagttactgactgcagaatgcagcatcgtccatccactggtgctagtctaagctccttcaaacacacaaaactggtgtgctgatctgtcttccacaggaggagtgtgtttgagttgtttttgtcctggatttgagtgagaagatgaggtcttaacttgctttttcttggttccccttacaacgtagaggactctgacagcttccactggttatagtgaattcctaagtaatgctgaggtgcatgcggctggagcccatggcatcggcgggacactgtggtgaatggttccaccactctgtgtctttcccagtcttttgaggggcccacacctaacctaccacaggaaagtgccacaggctcactcatggctccaaccctcagactcttccatgcacacattctgcaggccacagggctgcactttcaggtacatgttttgttctccaggcccactgtagaaacggcccagccctttataagtaatgagacccagcactcacacaaacaaaacccctggaaagtgacctgccattctcagcaaggttcattcccagcaatttgtagatacatttttccaggaagggaagaaactctacaagataaagcacagcgatcagacagccctggatcctggatactctgttaatccaagaacaggaaacattccaccaatattttcttttgattaccaaaaaaaaaaaaaaaaaaaagaagaagaagaagaagcatcatttactgtaataattattttgccaagcaggaaagatgtagtaatggagtaaccgaaatggtaatttttaaaaatcactttgtgacaagtcactttcatggctgtttgtcaggcctggcatgtggccagtggcaggagaccgaatgagcaatgctgagcaagatgtagcccggcagaatgccatactgtcacccgctcttcggcgtgctgttatttatactaaacgatgacagctgtgaaaagtctcaaagttggagagtccgggagacgagtgcgtgaggattcgggtctaggaggccaagtgagtaagtaggtgttattataaagctttggtgatgtttgctcagggtaatgctttcgttgattacatagcggtcataacttaagggaaatgaatagtcatggtgacctggccggattagatccctggcactgggggaaaacaaaaggaagaagaaagctcatggctgtactgaggtctagtcccccgagtccacctacctcctcggtggcagagtgatttcctcagtcacaaaagcaaaggatcttgaaacatcgcctgtgtgccctgtcctaggtgaggacacaggatctaaagagtcaacagcacagttgcaacttcctgccaagccacctttgcacatgacttctctctcaggaggagagcaggcctccgctgtcctctgactctgcaaaggcaaagcttccttctctccccaaacctcctggtgcctcagaatgtgttctccctcttcaagtcggtgacttacatctttttttaactttatttttattttatttgcactggtgttttgcctgcatgtatgtgtgcggatgccagatcccctggaactgaagttacaggcagtaatgaactgccatgtggttgctgggaattgaacccaggtcctctggaagagcagtcaatgctcttaacccctgagccatccttccagtcccatgacttatatcttatagcacctccctccccagcctgttaagtctccaactctttcccccattgcttgatgctttgggaatcttatatttccccctaagcaaaagccactaactaacagggaagaaagataacagttgctgcatagtcccaagagagccatgaccaagacagtccttcattctttccacttacaaaaacctcttcctccttcttggaggaaaacacaatccattgtttttctcctcagccttggtccaagctaatccctccttactgagaaattccttaccttgctaggctaggtcttctcacactagctcatgttgacctcttctgccccagggaaatctcagggatgacagacacacaacaggcagggaaattaagttatgtatcgtttacatagttttcaccctaggactctaatgcatatgccaggagcttccaaactcatccttgctacttctctgacttggccttatgaccctgaggagtcacaggaacccccgctgctgattccacacagaaccagagctgggaaactgcatccctcagcctgggataattgcagccctgatgtaccacctgcagaggctaggaatctcagaagtccatcaagctgttcacttctccaggtgcagaacccctagagacaccacaaggtgggttggtcaagctccctgaggattactcccattggtactgattaaactctaccattccagaactttcctgttcctgccttggtggagggggtgggaggaggacactaagtggaattcacacctgtatttgccagtcattcattatattgccttttccccagccaatgacaagtgccagtgttgattaatgattcatgtactatcttttgtgtgtactcaataaatatttgctgatctggcccaaagttaaatcttaatacccagggacctctaagacctgcaccaagttcttaatcctggagacagagacgatcagagctggtggaaacaaagaatttgtctcactttgcttgtagggaacgacaccactagagagaggtctgatgcagccccagcctggaaatcaggtggagtgtgatctgcaatggaaaagacatccgagttctcacaaatttgccaggaaacccaacagccattctagtttaccaaagtgttcttgggttaggcctgaattcaattcatctgaaagctaccaagaaagataagatccgatgtttctgaaccatagggccctgcccagcacagctgccctaaacagatccccagtcagcaccagaggctgggggctgctcccagaacagtcatggtgaggtcttgctctggacaagtggtggccgagctgtcacgaggctgctggttgcatcttttcaagtttctccccaccacttccaggtcctccttcctccatgctcccctaaaaagcagagactcctttggcttcttctggatccgcctcactcccaaagtgagtgtaggtggttagtctgttttcctcatcagtgcccaaaacaaactgcctccctcccagctcgacctcaagctaagaataaacagatcaatcaaccctgggggacagccccagcagcccagtgaaaacccacagacaaccagccctctggacttgtcaggcaggaaaaaatgtaaggggttttagatcccgttaatactgctatttgttagatagaatctcagagtctctacagcaggcaggggcctcagctcaactctccttatcacagaaaattaaggtctagctcttcggggcttttaataaggtagaattgagcccagtgtgtccgtttctaagcacgtttctggattcatttctctctagttgcacaacaacgcacaaaacaacaaagccacaaaattctggatggggaggacagaaaatccaaatcagcgctgaaatgcagaatcatagatcaccgccaacagctccaatatgtgctcctgactggggcatccatcactggcccctggagccccagccagggctcttaaaggaaacacacaaggaaacaaagaaactcagacctcttggtttccttgaagccttggtggcaagggcagtcaagtggcttttggtttgtcaacaccccttccaaccatgcattggatcggacttagtaagtattatacccaaagcggtggtggtggtgtgaagagagagccgccctagccagtcaatacatgtctagctatttcgaagcttggggtagaatgaaggggagagttgagtttggctttataaatgcaggcaaaaaaaaaaaaaaaaaaaaaaaaaaaaaaaaaaaaaaaaaaaaaaaaaaaaaaaaaaaaaaacaaaaaacaaaaaaaaaaaacagcttgtgattattttttaaagcaatttctttaagagaaagaaggtaacaaaagggacaaagacagttcaaagaaaaaacctgagatcactaactcattgaaggagatactactagtctcattttcccatctcaataagtagtgtccaggaaaccagaatgctaccgggtctcagcagtcatcctagtctggtggcatgaagcaggctggggtcagtaaagtgacactgtgctatgtagcttatcggcatattttgagagcttaattcagctagtattatgtttacattttggagttaatagtatactttttagttaaaatctatttttattgtggtaatacgtacataaaatttactattttgactctttttaagtgtgcatttcagtggtaccaaatacatttccatgctgcacagacatcatcaccgtctgatgctggaacactcatctcaaactggaactctgtatcccttagataatagctggtgggggtgacagacacataacccaggaacctcctggccttttaccatgaactatgtatgtattgacaagtaaattcaagccttgagagagaaatggaaaggacatttctcccatttctgaagagggtgaatgggacatacgacaactgatgaggccaccgttagcactacactgaggagcaggagactgtggttcaagctcagaaataagtatcttatccaaagcttacagcccagccagggcagaagagagacttgtcatctcttgtctcacactggcccagcactaagctttctcagtcccttcacccatatgtccatacgtttatcagctaaacaaaccttactcggatgttcctgtgttgagggtaagatcttacaggtaaataagagcagtcattgactcttcttccttaacccccaaagagtgggacacatagttagggacggggtacataaccataccttctatgacaaaacccaggagttggcaagaataaacaggctctgactgacacaaaggaggaggtttaacccaggcagggaaacgccattcaaacggaggagttggaaggctgtcctaagacagcggccaccaagaaaaccaaggagaagcttgcactccgatggtagttactcgcctgatggtgactgagatgaggacaaagctgggcagttccagtggatggagcagtctgcctcacacctgctgcctgaatcttctccactagagtgaagccaagagtctcgggctttacaagatgccacaatcactgcagggaaccagtgggatgccagagccaacagaagaaacagaaggaaacagggacaaactccagaatttacaatatgctctgatgacgtcatgcccatagctgataaccacttaactgcttcttaaatttttattatgtggtttgtttgttgggggcaggtgtgccacaacatacatgtggagaccagaggacaatctgtgagagttgattctctccctccatgatgtgggctctacagatagaactcaggtcattaggcttggtagcaagtgagtagccgaggcatttctcttctaacccctcaatagtattaatagcttatcagaatgttttcatcagcctgctccaaagaagaagcttaagaaatgttggaaggaggagctgagaagatggctcagagtttaaagtgcttgccacacacacacacacaggaagagcggagttcaatccctaataaccacataaaaaccaagcactgtgcagcatgatcccagctcaggaggcagacacaggagcctctctggggcttgcaggccagccactctagttcaattggctagctccagggttagtgagagacactgtttcaaagaacaaggaggagagggaccaaagaaggcacttgaagttgacttctggatctctttcacacacatgcccttacacacacacacacacacacacacacacacacacacacacacacacacacaaatgctgcacacctgtatgtgtgtatgtgcacacccaaatgcacacaaggaaatgttggaagaatcaaagagaattctacaagaagaaactgtcacattggaatccagactaaaatcaattcaacaggtgttagcagatctgaagttaaatcatattcaaaactgtacagaagcaaactgtgctgtacacaaaccttctaactggtgagagctaagcattcacgtactgtatttttgcttttaccttgctggaaatggatctgagagccgtacaaatacacccaccactgacatccccgccaagacttaaacatttttcaatccttaaaatttgttaaggcatgaatagtgtctaaaattataattttcctttttcaaatgatatggggagaaacctttcttttaaaatgtcatgtatttaatgggaacttgccaactttcatttcttgttttgtatacttctaaaggcaaaagcattcatctgtatacttgcataatgactttatcaaatgcatggattttatattgtgttattaaaatcagttaaacaatcttctatgtttccatattaagatttagaatacttgttacaattttcacttacaagaaaatttaaccattgtgtgctattattcatctgtctgattttacctgctaaggaagagaaaagccttcagaaaatatgttcaaccctacacctacctaccaatattacagcaatatcttcatcatttgctaaccaacagggggcatactgaggacataacatactgctaaacaagcatgtgggcctgagtgtgaattcccagcactcacataaagaaaagcaagggtacatcccaacactggaggtagggacaggacaggaaggtcccagaggttaccagccagcaatctggccaatcaatgagtttcaggtttgatgaaccaaaaaaaaaaaaaaaaaaaaaaaaaaaactcaaaaacaaacaaacaaaaagaatataatgatcaaggaaaccacccctatcatatttacctctgtcccccattcaaatgtgagcacacatacgctcacactggtgcatgtacacacatacacacacacagacacaccaaagccagagcacttgtcttgaatacatgaggcccaggttccatcccataactacaaaaataagagaaataagtaaatagaagttaaatacagaacaaatgttaagctgaagaaatggatggggaggaaaatacctaaaggcagagggaacatggagaaaggaaacggaggggaagaggcagaccaagatggcatcgatgagttcccttggcagagcagaaaggaggagggaaaaccaatgaatgatgggctgaggtaaaggagaggctggggaagggccaaagccctttcaggactcctgacttctgtcaagagctgtgtttctggcttttgcgggagtgttttgttcttttgagacagcatctcactgtatagttctggctagcctgggactcactatttagaccaggctggcctcaaaatcaatgagaaccacctgcctctgactcgagtatggaattaaaggtctgcgtgacctcaccataaagagtttaactgtttccaagggaccaggagcaggggattctggaagacttggtcagaaaagcacgagctgctacgtgacgttcttatctggggctgtctatgaacaccgagacacctttcagagtgatcttgacatcccagggatctgtggcacagacatctgtcccaagagaagcctgctctaaagcacaggcctcagcagtgtgttcgctgtggcttacttacagtctgggtttcctctctgtacccacaccgtggatcttgtcactggggggctgaagcacctaaaagtcaacatcactctggtcctcctctgcctcctaagagtacctccaagtctcctgcttacacagtagagacaggaaaccaaaggagcttggggacattcagggcaacttccccccaaggagtcgctggaccctttgaggacctggcataaacaagctgccataattgagcctggttcttcctgactgataagagaggtggcaacattgatctgcctggccttgaactccattctcctgtagattctaagatagcgctacccaccttactatcattgaggcagctagagagtggacagtgctgaaccagttcctgtaagaagtagctcctagtcatgactgcgacccctcagccacatgaacttgagcaaatcccaccaaccctgcgagacctactttctcctgtggtggttggtagtggggggggtgcggtataatgcttgccacagctcctgaccttcgggtataaaattaccccccaaaaagaaggaaacgtgaaagatttgaatgctactcacacgattattttacaatagctgctaatggcagagttctgggggcaggagggaggaatgaattagaattttttaatctccctctcaaaggcaggaagggggtgaaaaagatttctgtatttatgtagattaaaaatctcattttgttgcttgactcatttcgggttccttgaaagctcctgtgaaagttgattagcacacacaggctcagataatttccccagagagctaaacaaattagaatatattttttaactccaaccagctgacatgggccatcagttgcatcctcggtacaagttccatcttgtcactttaatcctaaaatgggtaagcaatatttacctggtgggaagcaacagcccaggaagtggttggatggaattgcaaagttccagctcccactcttccaagacagccacctcccggcctcaggcaggcctgccatgtagagtctagggtctatgaagatggacccaaattatcaaccaccaccaccctcggagaccttgaatcaaatgtaatatacctgcaaccaatgtccatccagattggttgattctgccttcgggtgattctccaacatggcaggtgagattaacacccacagagctgcctgtgaggacgccacagggttgccagcctaagtagcactaatggctctatcaagcacacattgtcacactgtcatcatgagaacctccacacccaacgagggccactccatgccatatgagcttagtggagactggactgacagaagtggggtatccacaggaaagtttgaggggttgggcaaagatgactccaagttgctgcaaagccaatccagttcgttgctttgcgtttgctctccacaaatccctgcctgcccccaagcccagttcttgtctccctctctggctgcatgttggtatttagacaaccactcagtaggtgcatatggaactggtgtaaaggggaggggcagtgagagaagccagagtggagtgtcagacaactgaggcttcaggccccgctctgatacttgcaagctatgcatgacaccgggagagtgctttgtaaattgcaacaggctgtgggaaaatgagcggttcatttgcaaccacactgcaggcaggcagcttccgcagcatggattcccacacatatcagaggctcttgtagacggatattctccttcttgtgaatttgctccctatccctttgggtcagccttgcctgcgagataaaaaacagcctccacctcacacatgcctgtcaccactcacacacacacacacacacacacacacacacaccatatccatacacacacacacacccatacacacatacaaacacccatacacacacacccatacacacacacacacacccatacacaacatatccatacacacacacacccatacacacacacacacacacacacatccatacacaacacacacacacacacatacactcacatccatacacacacacacccatacactcacatccacacaaacacacacacacatacacactccagacacccaccacagagagaaacattctgtacaaaagaaagctatgcctagattatctcccaagacgaatccctgccctgttggttcaccataacaatcaatgggtgatctcttctatttattcagatttgagtcttgaaaacatcacatcattttctaattatgtgaccttaaacaaggctggttgctaccctctatgcctgaagttatgaggtttaagtcaactactgtgtgtaaagtgagtatttccattggtgtgttatgattacttaaggctaataggttaagagccctacaaaggcctcgcaacctcaaaggcaacaattagaacacctttgaacccaaatatttgtctctgaaaagacaaactagttttattagtagtgtaggaccccagcctaagatattttctttgtcctcgcctccgcctggtgactggggtcgctgcattcccgagtggtcaccccgggggtctcaccccgtgggggtctttcagtagtacctaagacccacattctttttgcacataaaatatttgtgttagagttctcctgaaaaccaaaactactaggaaggaccacacaggtaaggagaaggagatctgggcctcgagagatgactcagcagttaagagtgcacagggtcttgcagaggactggagtaccagccctaacacccacatggggcagcttacaatctcctataatctagctgcaagaaatgcaacatgctctcctggccttttcggacatttgcacataagtatctctctctctctctctctctctctctctctctctctctctcacacacacacacacacacacacacacagagagagagagagagagagaacagcttgtttatattttaatgaagcagggttatttgtaaataaaacatttggccactgttggtcaagtctccaatcctgtaaccaaataccttgcagcatagctatcttcaaatcaaaaggcttgcattggctcacagttttggaagtctcggctcatgactgattgttcctgtggctgtgtggcgtatagtggaagcacagtaaaacaagctgctccgctcgtggctgccaagaagaacccagagaccactgtcccccaacaccctttcagagtattccccacagtaagctaagacaccctctctaggcccacctgctaaaggggtcacctccctccagtagcacaaagctaggatctgagcctctagggaatttccagaaccaatcacagtatctgtctggaagatcttatcttccatccatccctcacttccctatcattcccttccaaactgcctttggattgatctgcatttaacagtctgctatctgcacaatacttaccatgtcaaaattgccctgagtgtcaccaaatgtgtatatttcaaagagatcacacagccttccacccctcctttccagaatgtcaggaatgtggagacaaactgacaatcctccaagtctgcactgcttccccctcccgggagctggtggagtagactaggtggcgatgtccatgcaatgggcttcaggctggactctgaagaacacaggcaagtaggatgggtggtttggcagtgagcacagactcaggggtcagcacctgcctcacagctgagctcacagagattcctggaagacactaacagtcattttcaggagcagggtgggacagacagagggtctggaggaaggagatggttcaatatactgcctttgggatgtttgaaaggaaggaaggaagatccaaacagatgggggaaagacagtatttgtttgatgtgggaagtgggtgtggtgtttacatcatcccctacgtttctgtacatctaaacattttaatcttattaatatgcttacttaaagaactcaagaaagagaatcttctgctgctacttcgctaagccaatatcatttctaacggcattctaaatacttaaactcattcctagagataggtgtggctttttgtttttcagaagcagcagcaagagaccattacagaaagtcacaactcgtcaaaatgcagagaacaacagactgtggggtggtgctcaaccccaactaatacatgtgtatcataaaccctacaccagaagctcagggaacatccagaaggattgtaagagcaagaggacaaagatgggacagcagctgcaagatagtgtcttttatgtatgacctagaagctgcactcgggaaatttcagcaatatggtcgccgaaacaaaacctaaaaaatgacaccaccaatcggcatgccaaagtgagtgtgggactctcacaaggcttcatcactagaggaagagctacaggcaattaatgattgctgagagaggccaggctgctctagggaggagctccatgatggatgattagctggtcctaagaggtcatccctaaacacacgtgagacacactaaatgatctcagggggttgtatgtatacatttatatacatacttctttaacaataataattaaagaacaagagccatgaatttgagccaggggtggaggtacaagagtaactggaaggagggcaggagaattatgtaaatatagtattcatacatgaaattcttatttaaaatagttttaattaaagacaaatttcagcttcagtcaaagatttctattgaagatgaactttgacctgaaccacactggactacaggggctcaggattcatgatgaagcttctctggccccattcattgacagagctgcagaggggggagtggggagctaatttacttgtcagacttcagctcctcatggctgaaagggattcaagtatttgcacagacttctggcctcctcatccttctttgtcatggtcccgtgtgtgacagttttgtttacaaccaggaaacactgccaatctctccaaagagagctgtacctagaaaaagcacattacctcatcctgacaaactaatgtcaaagataaggaatctgaagggtgccgccagaagttaattgacactaatttgaatagttaccacagttacagatgataataccctgtgcggttttgagagtttaaaaaaaataatgtctttatacgtctactccttaattgctttctaatgacccctgtgaaggaggcccataaaggcagtgtcatgcctgggatcatccctaatcaaatccaatccagtcaccctgtcaggtgacagaaacttattgtgtactcatcaggtaggccaggccaggtgctgtgtaggatgctaacacagccaagcaagctccctggccttgagaagccctcagtcccacacagatagataagtacaatgatagaccacataacgcagtcatgaaagggctgggagcgatggaggagggagcgcccatctggagggagcagatgaagccaggaggtgggggccgggatgtgacatgtgagtgctgcccaaggctgatgaatgttaggatgaagtaaagagaagtcctatacaaacaaaagacctgggaagggaagttgggcctctcagtcttatatttcaaaggcaatgaggagacttcagagctatcttccacactgtaaaaccttcatcgagatgtaactcagctctgtacaagtcacccatgcaaggtgtacaatccacacgctttactatgtttatagagttgcacaaccatcgtcggttttagagccttttcattcttcctacaagaaactgcagatccatgagccagttgttcccaaatcttcccaacaaccactaatttttgtgcctatagaatggactcgtctaaattctatacaattggaatcatatgtccacctctttgtgcctggcttcccttgcttaccaaacatgttttatgaatgaactcacatgtgatttctttttattgccaaatgatattccattgtgtgccacattttgtttagctactcatcagcagatacactttcagattagatttccattggggacatcacaggacacgtttttactgttgtgtgataccactttgcaggggagctggctcagtcagtgttcaggaggaggccgtttcttcacagggactaagtgatgttgaagccacaggaacagctgagatgcatgtgtgcacactccatgaaaggaaacgaagagtccgtccccctctctccccccccccgcccgccccgtccccatcagaacttctgctcaataggaaattaaaactgctcataattactccaaagtcacctgacacgaggggaagagtgagcaaagagaggcaggatgtaaaaccaagggcaattagacaactctccttggaaacttggaaaaacatgtggccttgtgaacacaaaacagatgtcctgcacaccttggcagtggcccatgctggcgacaggctccggagacacacctgtaagtctgttcaatagctaaaccacaacaggcacaatttaagagaaaagagagctgaggaagagacgcatgagaggcgtccgtgctcaaggaaaggaagggacaaagccatcatgaaagaagaaggcagactgcgtaaacatgaggcagtgccacgcctcggaaagcaagagcagtcagcattcataattcatgggcaatgcactcgagaggttccaagtgctcacgggactgtaccatttcattggaggctcaccatacaaccatgaaagatagccaaaggaagctgttcacagagtggaaatagagcccatagcattaagatgattttttaaacccatgaaggctcacaaaggagcttattaattgtggttggcttagtaaccagcaagttgttggccacattggacagggcagtctcaaccaagtgcagatggtaagagaggggaactgggtgtgacaaagtggtgattttactttcaaaatgtcagacgttgaagaaggaagataactcagccattaaaacatttgctgtgcaagcagcaagcttgaggaccagggtttggaccctcagaatctacataaatgctgcatggtagtctcgctctgatcctgacacttgggaggctgagataggggatcctggagcaagctggctatcgagactagccgaaaactctgggttcattggagacacccggactcagtgaataaggtggagagtaactgagaaagactccagatgtcaacctcagacttatgcagacactcacatgcatgggtactgtgtgggcacacacacacaaacttgcatacacaccataccacaaacacacacacatgaaaaagaaaaacttgggagagctaggaccacaatgagtggtttgcagggtgatcaagggatgcctaggttttgtttatattttgcttgtctgtgagctagtgtcaggccaagcagggaggtgaagggtgcccagaaccaaagaccagaatggacatttgaaatacatcagagacaggattgaatctaaaagatgacaccaattccattttgtgttcttaggtcagacatgccttcctgaatgataacattgatgccaacagccatcaagcctttctctagtcttgctatctgggctggccagagaggaaatgggtacccttggatgtttgggggcctctgtggtaaaagccttccaatgggaatgtgtcaacagtctgcattctgccctgatgaacgaatgggactgaaatcacatcaggcttcttagttattatgttttgcctcacttcaaaaggcagttgtgttagctcattttaactatcaacctgacacaacccagagtcacctgagaaaagggtatgaacaaagaaattatctagatcacgttggcctgtaggaatatctctgggagagactgtctatattgttgctcgagatgggaaaccaccctactaaccctgattgtgggcagcactgaactgtggaagaatgaagagtgccagctgagttcaggagcaagtggggagcatggatgcattgtttcgctctgctcttgaccagatgcttgagttcctgcctcaacttccccttaaagcagaacccctttctctcccaaactgcttttaattaggatatgttgttacagcaccagggataaagttacagccacagtgaaacccgcaacctcctgtgtgtgcaaggtgaccttgccattctgctcacttccccacccccagggtcctcacttgaagcaagaagcagccaacttggagactttctagcagccattgactgaaaaagcatcacatttgctaggagaggggactttccctgcctgagcacctccacaatgtcatagttcctatgctgtcttgatacacgagcatgtgacaattttaaatgcccagagacttggtaaagagggcagaggttgccgtgtggctcagctgccagtagatgcattgtatagtgttttctctaaaggagacgtttcttctagctgtggctttagcaaatgccaggctcccttcacagtgctttgggtatgcaagcaaggattatccagatgaaaacaatcaacaatcaacataaattctgctaagattctacaagttgatatactaaatcgaatttcaggaccttttatttctccagataagggagtttgggtctatcaaaggaaagcttgctcggtgtgttagaagaaatgagtccaagacacagaacatcctagtttatcccatcttcttattcatcctgtgtcttagtcacatactgtgaggagacacatactgtgaggagacgctatgaccacagcaactctcatcaacgaaaacatttaattggggtggctcacatacagtttcagaggttcggtccattatcatcatggcagggagcatggtgacttgcaggcagacatggagctggaggaagagctaagagtcctacatcttgtaggcaacaggaagtcaactgcaacactgggtgatagcttaagcataggaaacctcaaagcctgccctgacagtgacacacttcctctaacaaggtcataacatacctactccaacaaagccacacctcctagtagtgccactccccatgagatcatgggggccaattacgttcaaactaccacatcctgtgatgaccatgtccatctctactgccacattgtcctccatgttctgaaaaaaataacaaaatttcctatgctgtgaaaccctgtgtttacataggtggacagggggatacagtaactggggtgactctctttagtacaagagatggaaagtctgtgtttatagcattatcgaaaggtgtggaggtcacaatcttaacacttacaggtaaataatcagacactggaaggcagagaacagagagagatttctctgcagtctgattcagttttgtggttcacccacgggctgttgagtcttcagccaaatccatttgagcagtaaacaacagagacaatatcaatgatgtgatattttacctctgctgaagagtgctcagatgccgtctggggagaagagaggccagctgaaatgtgaaaagtgcctacaagttaagatgcaaggcaaggaacaacaacctgggactccggaccatatccaaacactctgcggatcaaaccctggagcgcaaccaggcaggatagccagagcggctgggtggtcggtcacacactgcatgcctggctgctgcttagacaaatacacagctgaagagaagccaggaacatctcccagagagaaagccccgcttttgtctgacaaagccgtgcagaccccaaaggaacgcacaataggaaatgaaagttggacagaaaattgattccaacaggaaacagaacgatccatgctggagctcagttccagggagatcattgcaaaaacccaaagcagctgggctagagagccagcctccgctctgcgtacactgtaggatggacagcagggagcagcccagagcaacatggaaaggccacagctcagccatccccaaggacttgccaatgcaacttaagttcagctgcagctctaccgatggaaggctggtagacgcctggcagagggccacgaatgaaagagaggaaacccctccttgaaaggtaggggaatgggccggagacagagatgcctcaatggtaagagtgcttgctgggcaagcatgagagtctgagtttggatgccagcttccacagaaaatgctggttagaactgagtgccccggaactccagcactaggggtttgggagccagagacaggaggatctctggggatcaccatcccagcaactcaatgggttcagagagaccccgactggaggggagaaagcagagaatagagcagggcactccatgtcctcctctgctggcacaaagcacaaatgagcagccctcatactcacatgcacatacaacagacaaacacaccacacctgcgtacatagacctcaaaacctaaaaataaaagcaggggtggacgaattgggggcattgggcctgaaatcttcaccaaacgaacttgcaccggaaggaagggtttcccaagtcccagtagcagttctgagttcctatgatgttgaacaatggacaaagctattcaaagagaacgataattggagctcacccattcatgagtcaggccagggctgcaggacaatgcattttcaccctgtcttctgcaagtctctggggccttcacagaaatgtgctttgtgacatctgctgtcctccactctcattgccgattgctgggacagtaacaactccagttctaagggtcacggaggcattcaagtcctcagagaccaaatctctgcccaactcagcctctcctcatggcctctaccttggttgacagctcataaaaatgcaccacatgtggccacgtgaacagcacagtcagtaaagtgctcactgtgcaagcctcagggcccgagttcaactctgagaacccacgtggaacctgcatagtggttcacatttgtaacgccagagctggggcggggggagcacagccagatcctagggctcactggctggctagtttattctaccagctaattgagagactcaaacaaaacaaaacaaaacgaggttggctagaaagatggctcagcagataagagcactggctgctcttccaggggacctggattctgttcctagctcccacaagaaggctcacaactgtctgtaactccagtcccaggggatctgacaccctctttttatctcctcagcaccagccttgcatgtggtacacacacatacaggcaggtcaaacactcatacacaaaaaataattaaattaataaatcttaaaaaaaaagagccatgatgctatctgaagaacgatgcctgacgttgatctctggcttccatatatacatccacacactatgtgcatgcacccacatatattcacacacacccacaaatgtgcacatgcaggcacacccaggaccacatagagaccttgttactaaagcacaaaatgttaaagggatgcttttaaagcctaaatggtcattgtgacttatctagggaaggacaatggccctgtatgttgctcaaagtgatggctaatgctgaaactgtgcacactagatcaaactgtctttctccaaaaggcgtattgggctgataataagtattctggatatggatccagaagacactgtctcagatccagctttatctaatgtctgccgggcagcctggcactcataacttaacttctatgtgcctctgcttcccctgtgacatagctactcagttcctccacaggactgctctgaggactgagagagggctaggatgtagctcagtagatgaagtccattctcagcgtgcaggaagccttgggtttggtccccagccatgtgtaaaccaagaatgctggtacatcctgttatcccagctctcaggcagcagaggctgaaggatcagaagttcaaggaaattctcagcaacttagcaagttcaaggtcatcctggggtacacaagaccctctcaagcatatttttttctgaaggagaaaggggtgtgtgtgtgtgtgtgtgtgtgtgtgtgtgtgtgtgtgtgtgtgtgtgttcagatcaatgtactgggaaactttctcaatcactgtccactctacattttgagacaaggtctcactgaacctggagttcaccgatatggctgggctaggtggtcagtgagcttcagggatctgcctgtctctcgggcactgggattgcaggcatgcgctgcataaccccttccgcctccatgcatgctgggaattgaactggggccttcatgctcacacagccatcactttaataagtatctccccagcccccaaaagaaatttttttaatataaagagtattttgaaagtccttttaaaagtcaatctatatttcttttcattacagacttccttatgaggtttttcttgaatttcacataaaattaatttgattccttatgaaaatttcatctgacgatgggaagccacacggggaaggaagagccagtgtagccccagaactcgtcctactgagagcatcaagcgggtgagcctaactcaggatggggagtcagaactgggtacaaatgcaaaaagaatgccatccttaggaccagccctgctgaaaaaaaaaaaagggctatcctgtgctagtgtctaagcaggcattgagagctgatggcggtggggttggctctgctgcagaaataaaaaggaaagcaagggggacacggtggccatccacacagtgccacaggcgtgaaagctaagctcaaaggcaggcaaggcggggagcgagggaggaacacaaacaggttttataatcaatccaaaaccacagttgtgaaaatcacataaaatgccatctggcctcctggatgggggaacactaagcagaggcagccttccaatatgcatgttctcatttctccaagagaacaatgcttctccctacccaacggactgtgacagagtcgccccgtcctggtccagtgtccaccctttgccaggactgttctgagcatcggagaagcaaccagaacaacacaggacacctgtgcggtcccggatgcctctggctctgaccccagtcagcaccatgggcaccgcctctgctttccaaggatggtgtgctcatgagcttttccatccccactggcttctgaggtttttatacacacagctgacaatgttctatctataaactgatgggagtatgtaagattaaaaagataccataaaagccgggcattggtgctgcactcctttaatctcagcactcgggaggcagaggcagggtatctctgtgagttcgaggccagcctggtctacagaacgagtgccaggataggctccaaagctacaaggaaagaccctgtctcaaacacccccccaaaaaaagataccataaaatctaccaacataaccattttgtaacacacagtagtgctaatatagttaatattctttaaccaccaccacacagagagacatttgaaacttcacccactaaatactaacccctcagacctgataacctctattccattttccacctctgcaaataagtcatctaagtagaagcacatggcacttattcttttgtgtctggcttgttttaccaaggtcttcaaagttcatctactccataggtgttagaatttcctcctcttaaaaaactgaatggcattcctttgtatgtatctattacatgctatttacccattcatctgtcagtggactacagagactaacttgtacatagtaaatgaaggtaaaatgtgccaatccactgggccttctggcactattgttcccagttcacaaacacaccataagtctgccactgtggtgtccatcccacctcccagccacagggttatgagttcaggaagagcaggaatcatggcctcagttaactctgtaccattctcaatggggggaacagtgccataatggcaggaattcatattgtttgataaaggagcaacgtgggagtagtgttcttctaagtccaagtattccacagctgcacagagggtctcattttgaagaagattactattactactactagtagtagtactgctaatactaatactactattacttctgctactgctatctttattgtgagtccaatttttaaaaccaatacttaattaatcagccaaccaaaaagacagtgtatagtggtagaaagaataatgcatgttgctggcaaggaacatgcttctcatcacaatgcatgggaaggagaataaattccaggccagtcttggctatgttgtgaatttgagcccagcctaagcaacatgagacctatctaaaaaaaaaaaaaaaacaaaaaaaccacacaaaaaaaaagaataatgcaggtggagtcagaagcctgcccctgcttcataacctgtcttatggctctaattatgtcattcatcctttctgagtttatttcattttctttaagaattgaaagttcctgaactgatgtgcgtacagtggcattcacacaatttagtctgtgtaagctagttgtctgcccgcttgtagatatgcacgaagaatacatgctactctcaagtttccaagaagataaaacatgcacaaaatcactagacaacacttgcaagttatgtgtagagcaactataaagtgtcacagcatgcaggccataaaataatatttactgagtttttattgagctccttgggaaagtcatagggatggaattccacacaagactcagaaagttcccaaagaatgcaaagtggaagccagaagttggaccaggaaaggtaaggctgcctatgctaaacaagcactttgtccctgatgtaacgacattcaagacagaaagcacaggtctccatattgaaatgctcccaggaagctccagccaaatgtccctgggacccacacagcatagagtcatcaagccacttccagccatgagtccttgtgaccctggctcagactcctaaccacacctctcagcggttctgcttgcagattatgtacaaatgattctgtcacattgtgagagagtttaaaagttgttaataaaatgtgtcgacttcagaggctggaaagatccctcatggtagagtgcataccgagtaagcataggacacgagtttggattcccagcacccacagaaaaggcaagcacggcggtggaacatacctataaccccagcactggtggatcctcagactcaccggctggccagcctagcttcatctgtgagcgctggtcccgtgagagaccctgtctcagaatgacaggaggacatctgatcctgacttctgggttgcacattcgtgcactacacataatcacacccattaaacacataaaaatgtgtttgctaaaaaaataatccatcacaagatttctaagaaaagaatgtctgtgaacgtgagcatgagtccctggctcctggaaacatcatgtatataatacataaaccacctggtccctggacctcagctccgtttcccagcccagggtagagagtagtgtgaggaggatgacatagctaaacagtcaggacccaacagtttgcttcaccatgttacaaataggtcccacccaaaaacagagcccaaccaaaggaatcaatgcatgtgtcttaagccagcgaaagtcaaaatctgaacatttgaactctatctgcatgcggatgaaagtcattctagacacgaggtacaaagatgagtcagggaaagacagggaggtcttcgcacacatttagtcctggacaaagctattccaagcagatctaaacttccaaaacagtcccatgtttctctgatgccatcaagccagtcaatgtactctggtagttaaataaaaactagtttctcaaacacaactagatggaactatcttcctgacagaacttagagagggctggccaaacggcaggtaaagaggtttgccgccaagcctaatggcttgagtttgatccctgagacccatgtggtagaaagagaaaacagacacctttgagtcatctgtcccctgcacacacaccacacacaaaataaacaaacaaataaataaatgtgcttaatgaatatatccctttacgacttaaagtcacagaaaaacagggcttccacaaacaattaaacaaaaaaccccactagataggatcatatctaatattcacttgtctctggggcttgttcactcatcccgtgctacagggtcattctggagtccaaaagcatcatcttttgaatacttttcaacgtgggtggaaaatagcactgaaagtgagagatgagagcaagagggataaagtcagtgatttcattttgctctttagggagccagagagccacgggtaaagttctcacatcttccttaagcctgaccataagcgtttatcattgagccatttgacttcattgccccagcctgtgcctttagcacacaaatggccagttgattcaagcagttgttggtttggttttgttaaaacccaattaagaagctggccgactcaacgatttgttttaagtgtctaattaattgattttaaaatgttaaaccaatggtgtgtataaacatctccctagaatgtatgacattgtagttgatatttgtaaagggataatttccattctaaaccacggcttttaacacgtctacacttcaatatttacattctactttgggctcccactctcttcaatctttctccatgagttgaaggaaataagaacacgcttacaaaaataccacaaccttcaaaaactcacgcctccggggaacctacacccagcctcattaccaacatttctttcaaaagctggcctcaacccttcattacttcacctccccaagtctctgctccctactccagatgtgggtgggcatgtcagagatagagccattaaacacaagaaggggtcaccacagacttgagagagggagggaagctaccttgtgccttcaaagagggtgctgtgaatgggttgctaagaggaatcttgagtataggctctgatcttaggtttgggctctgagctttggttcttccctgagtaacagacagagggggccaagggagtggagcaggcttgtaacagatctttcccctttatgacctgagttgaaatgagagcctggagactccgtgggaggtttccaacacagacgaacgccttccatttctatggctcctttctccgagaaaactccaagtgttttatgaaccttgccatagacttcctgtccacagcccctcaggatacaaaacagggccaccattatggtctatgttcctgaaaggaagaactcaaaacattctgactgccttatttctcaaagggactctgcccaagggaaatcggagttcgatcatgaaaagtcaaagacttattcatctggctgcttctaagaagacaagtcagaaggaatgaagtaccctgcatgcaagttcctgagcaggaaaatggggagggggggttctttattgccaagccttccctgcattcccttcccttacaaagaagctagctgctgtaggctgacttccatttcgacaaatacgggtgctgccagggttgaacattggtcctggggactttgttcatttatcacaacagcaaagagttcacactagtcacttgttctccttactaaacgaagtcttcactgtgcaagactccaaccccactgccccaaacgactgccctgccctctcactcctgcaatacacccccatctcagtagcccagcagtgtcagctcttggaattcgggtaccaatgaaacaggtcaatcaggacctagacaagaaaatcaacagcaaaataaagaagacaaatcaagtagaagacagagggaaaacaagatttttctcagccttggggacaagatcataaaagattaaaaaacactctcataaaaggcttgagtctaaagcctctctaaattacatttctcagatttgattatattatgttggtggcacagttattaaacattgaagataatgactccattctgcaagtaacctaatattgaacacaactgataagcaggtccaggctttcaaaggaccccagaagttgaaactcaggagccagccagtgtctgggtgtgcttgacccaccgtgttaatgaactgttggccagaaagggatgtgaattttccattaggaagaagctggccagggaccacgctgcctttgtgaccctcggagaattgagggcggcagcaggaaggaagacagctttgcagatacacacctgcttggctccacacacctgatctatcagtcattcccaagcaaagcttggaaagtgacccttagagatgctctcagcagcagaaggtaattaggatctctctgctgcaccctgaacaaacaggcacactactgaaaggtttcaacaagttacatttttttttttttttttttggtttttcgagacagggtttctctgtgtagctttggagcctatcctggcactcattctgtagaccaggctggcctcgaactcacagagatccgcctgcctctgcctcctgagtgctgggattaaaggcatgtgccaccaatgaccggcaacaagttccattttttaaagcaacacccattgtaggtgggagtgggtcgtcgagcagaggatatagcaagggaagtgtctatccctgaccccagaaggaaccagcaccttccacccaagagaaccacttccaagggctgtctgggatttatgcaacaacacagacacaggacccttcttccgaaggacaggacagcccaggtcagtatatgaggtgtccccaggcagctggcaatgatggcctctccccttcccttggtcttgggcacgctgggttccccatgtccaatgtgctcttaggatgagaagccgctgtggaccacagggtcagaaggaacctctctgaacatatgccaccaagatagcgttcatggctttagagtgactcttctgggctgcattacattctccctcacacctcctagggggctgggttttaatggcagagactggaggggatttcacgtctagtctcacccagctctaaatctattctctgcacaacccagaaagatttttaaaggaaactgggtcacatctcctcttggttaaaaagcccttttcataggtctttgcttatctttgggagagagactcaggtccacctggatctggatggcatggagtttaccttctttgaaaggtttttcgggtttctgactgactctgatatttgttttcaaacagctcaagcattctagcgcactggaaatgacggtttgcagaactgtgtcagcccctttgcagcgtgactctgtagcgcctcccctagggaaacagagtctacttccctccttttaaatctagactgtccttgtggcttttttagctgacaaaatgcagcagaagtgacaatgggctagtgtgagtttgggctgcaacagacttccacttggtttttggaaaccctaccccaacacatccacaagtccaggctagccttctagaagataaaaaacaaaaaaaaacaaaaaaacacatggaaggtaaaggagaccatccaattgagagttagttcagttcacttatccctccactgccctagaagctgatgaggttgaaatcagaagaacaatgtggctgagtgagccataactgttagtccagtctgcagaagcatgactaatcgttgatactctaagatagtactggagcatttgttacacagtgatgggtagctgttacacccagtaagcagaggagtgcagaactgactaagctatgcagaagcccaccatttaaccagattcactacttacattcattcactcaattactcattcaggttatcactaagctcaactgaatgccgggctctgtcttagatgctggagatctaaaaatagaaggtacagtccctgattccaggtaaaggagaatgtagacgatgcataggcaattcgaacatagagtgtccgaaggactaagacaggtaagatagcctaagggagttagaggaaggagcgtggtgaggcagcttgggagggcttctcagagaaaggatgtgacacttaggaaaaccaggaggcatttagctaggcagagggttgtgacagacatttgcatctgcactgcttgctgtccatgggagaccaacactcatggttcccattacatctcgtgttgttcctcctttcttggcagatcttccaaataaacaaaggaaaacccagggaataatgcccccaactctcctgcagaataactgtcgacttggagcctaccatgccatacaaaattttaattgaatactgtcctacttaaaataacaacagaaatacacacacacacacacacacacacacacacacacacacacacacacacacacggaggtggggggaacggcaaggaaatcccatgaacagaaaagagaagcgtggaagctctcactccgcagtcattcaaggggaacaaagacctcaagactacagaaactcatttgagccacaaagccacaatttaagttagcaattttcacccttgatgttgcataccattcctgattatgccaattaattaaagtgggtgcatctggtcccttctaattttctgctatcaggaaaagagtagctactaataaatgtttattggatcattttttcaagcccatacacttgctaagtagaaaatcacaataataataaacattgactggggtaatagaaggttctacaacactgtttttttttttttcttttttatttctacaacttgccagtgatttcttcaatgatagtcttccactctagggacagaagctatgctttaagctcatcctccgacttcatctaagactcaagagaaaatatcccatctcattacaccccatgagtgaggctgacttgatcaaacagtagacagggatttcgagaaaaagttttatttctgagcaattttgactacctatgctaatagctactgtatacaaggacaccattccctctgactgtaagccactgcatttgtcaatttcatctcactatgaggaaaaatacttcagagaggaaagatatatctggctcatgtttcagaaaatcagcccatcgtagtagcgtgggtggggggttggggggtggaggtcagtccatagcagcaggaacaagtggccgaggcaacagaaaagcaaaaaccagggtcctgggattaaaccctccaaaatcctccagtagtgtgcttcagccagctcgaccccatctcctaaaggttccaaattcttccacaggaatgcactagctgaagttcaagcattccgtatatgaacctgtgaagaacgtttcaagttccgacctcaagtcacacagtggcacacatctcaacaggaagcaaatatagttggagcctttgtgatacacaagggagttacaaaaaatacttgttgagctacttggattaactttttttctccccaataaaaactcccttctttaataatggaaaaccaaaacctgagtatttcgtttgcatgaacagtataggtcttttagcaagaatcccagactgctggcctcttctttttgctgctagtttaagaaaaaacgattctatttatttttattttttgtgtatgagtgttttgcctatattatgtatgtgcaccacatgtgtgcaaggaaagggcattggatcccttgtgactggaatctcagacatttgtgagccacgatatgtgtgctgggaactcaatccaggtcttctagaagagcagcaagtgtttttaacacctgagccatctctccagcctctgaggctgagaggttataagtgtgattcacacatttctgtttggacagcgtttcctctgattcatacagaaagtagaaaccacacatttagaattaatgtattcagaatgctgttatctacaatgtgatagtcctactggcccaatggtcacacacacacacagtagggaaagactccgtattgcccatgaacccaacccgtttcctaacatacgcagtcctataccttatacttgggcaccaccttctacaaaggaaaatggctcagtgttcctcagtgtcagatataatttccgattaggtgtatgttctagaatcactgagaacatatcattaatgggatgctactcattaatgattaccctcatcccttttaggttgcccattttcccatcttctgttggctgctaaggaagctgttccccgtcctaaggggttaatcatttcacaccgctcacctccacagacgtcatattaagctgtgtgtgaaatcacatttagttgctgtgaaaatgattatgacacttgtaatggaatattatggcttcaggtgggaagataagtagtgagaacagatgaatctctggagaacacaatcgtccctctcaggagtgatgttcaccaccaagtacacagcaatgaggggacatgctataaaaggagtcagctgggaacacaaaagtggactctgccgatgtttttttttttccacccttctttgtccactcactgctttttaaaacctgtaatagcatgattagaataattgccagaacctagcgagccatcagaaaacaaggatagagagacggagagagtggcacatcaccgctgagtccctagctaccacggaagctgggaatttcttcctctctggggtgtatgttggtataaaaaagagcctcagacacccttgggtaaaggcccttaaggggtctcgggagatggatcagtcaataaagagcttgctatgaaagcaaggcaagcatgagcaacaacactgaacccacataaaaacaccagccatggtggcttgtgcttgtaatcccggtagtgtagaggtagaacacccgtcagcctggcctgatggacaagccacaggtcaatgagagatggtgtcacaaaaccataaggtgggcggtgcctaaagaagtggccagaggctgtgggtccccctccccgcaccccacacagacgtgtgtgtgtgtacacctgcactcgagcattggtgtgaacccagacacacatgccatccataatgttaacaccagaatcggcaaattggctcagtgggtaaaggttcctgccggcaggcctgcagcctgagatgatgccctcaaatcacttggcagaaggaaagaacgagctcccaggagttgtcccctgaccaccacatgcctgtagtacccacagatacatgaattctaaaaattaaaaaagttatatcgctgttgagcacagcatcagtcccccatagagcaggtcacatgacctcttaattagccttaaaaattcaaccaagtcccaataatttgagagaaagaagaaacatattaatttagattacaaaacactaaatataactaaactactattcaaacacacacacattttatggcacagaatttctgcttactgtgaaaatccaacacctggaagaacatacacaaagtgaaacatatatgattcttgggttttataccaacatatgtccccagctgcatctcgtaatggtcatagtatttaatctatggaagcatcctcaaagagaacagcgagtctccatcttacagggatgcaaacagaaaaacgagctccttttctaagcgttgcacagcaagaccatggcagagttgtagctggattcattttcagggcaccctggacccaaaaacaagtttccttctttgaagaagaaaatcagaagagaaaggcaccagctgctgagggcgggaaagagagcttcttatgcacagagctatttattgtttatatgcatgtgtgagcgtgtgtttgtgcacgtgtgtgcatatgtgtggacaggatggtgcacggcctaggatgtcactctcaggaatgccaaccactttcttagaggcagggtccctcaatggcctgcagctcctagttgggctagataggctgtcagtgagccccaggggtcctcttgtctctcactccacagcactgggatcacatgtgcctgccatcatggctggcattgccatgtgggctctggagatcaaatgcaggctcttgtgcctgtaaagcaagtgcttcaccaacagagtcatgccccaatccccatagggagcataaacacacacacacacacacacacacacacacacacacacacacacttttgttttaaggcagggtctccctctataacccagactggactcaaactcatgttcctcctgcctctgctacacgtggagactgaagtcatgggtcaccatgcttgggccccacacccacttttaaattcatctttccctctagcaaattaagacttcacaagcatactggctgtcccccacaatggacttctagagcatgagaaaaactctgacttgagcaacgaattgtaggcaccaaacagagaatgcaggggcctgcttttgtgtcaaggctattgatttcagcccgaaattctgaatgcaaagtaatgaactaaagcagctcggaaagtgataagtgatgtaaaataaaagtggacttaatgatgtccgtggcttgaaaagaggacattttggcagcaaaatcagtgcgcagaaacgaacactcaacagcacagataatagtgtctgaaatgagtcccgctgactagcgcaaggacgacgctgatggtgcagagagaacaatgcaggtaaattgttctcctcaaatttatgcatggcggagaggatgaagtgtgatttccacggcgatgcttgggggaaattacagcgctctaacgcaggtacggcgttcccttttgtaactgcgctgcttcctcctctaaccctttcaaaataattttcctgcctgcccacttttcccttccatggcatttaataatttcagcccactcctcccaaattctctttccctccaagctttgccaagagccactggtagacgtgagatgccagccttgggcagaacgactactgggatgccgctcatcagacgggccaagcatctccgatggagactcgtgggcagagatgaaggtagccacactttcctggggtgcttatctgaaaagctgcccagggcagggtggggattctttgggttcccatctcactgtggttctgaacccagcctcttccccatttcccaaacagtgtcaaggaatcactgtgcccccagaagccgctgcacctcaagtggattcggccaggaaaccctatcaagaaggaatagtgtgagaaagaactaaccagagcaacactgatacagatctcaggggggtctttttccttcgttaagtgatggaaccttttgaaagccttcactacagttacttatggggggagggggcgccacagcacctgagggaggtcagataacgctctcaccatccttggtttggagacatgtcacttccacttcacacagccttccctgtgtctttgcatcttttgtttttatatctctgggtgaggacactcatcataggctctaccctaatctaggacggtgtcctgtcaagagcattagctcacttaaaccttgtagagaccttctgctgaggtaattttgcaagaaggcaaattcccacacagacatagacctaataatgtatgaactacttccttttgtgatgaatccagaaagaaattaaggaaggttctgtaccccagggaaagtgcaaactcaaattcatcaaagcgggtaggaaaactcccagcattctctgctgtgcttccccctggggtaagagttggagcttgtatccttcaggctagctttataggaggatgtctgaagagctggtttttgtcctcctgtctcggggtgctgacagacccaccatactctggaaacctggaggccactggcgacaaaagagagctaaaatgttgtgaagctcaagacaacctgcagttaagggcaccagagaaagcacttggaaagggggaactagacatagctagaactggatgtttataaacaaatgtccagagaagacacatctgcagaaaacacaccaggggtccccaggaattctggatgtgctgcctggtcaggtcctccctgtgtaaaactacatgatagaaactaggaactgtagctacttcacaagaactcacatcacacacacacacacacacacacacacacacacacacacatacacacacacacactgaaacgcacacacatataaacacactacacaccacacacacatatatgaacaccccccacatacaccacacactgaaacacacacatacatacacacaccacatatactatatatgcaggcacacacacatacacacagagaaacacagccctatcaaatgaccaaactacatctctggaaattagctctaaaaaaatgggaatgtcttaattacctgacaacaaattcaaagacaatcatcacaaagataccaacatacttgaaaaaaataatgcatgaacaaattaaaattatcaacaaagagggaatattttggaaataatcaaatagaaactttgggtgaagaatacaactaaactgaaaaatcaactacatggatcaacagtagacttgacctgaaccaagcagaagcaagaaccaaccaactcaaagacagagcattagctactatccaaccaaagaaacaacaaagaaatgaacgaagtctaaggacccagggatgtcatcaagttaagcaatatacacacattttgagagttccaaacaagccagggattttcaaactgctatagacacagcccagcggaacattgtaatcttatttttaaactttttgagtcatcttaagattatttttgcaattcaattgcacagtccttgagcatgagctttgtaagttaatgtgttgtgatttcaaaagtttggacaagactgtagacagagagaaacaggcagaaatgtcttggaagaaataatatcagcgaatgcctcaaatcagagaaaggaaatatgtacccagattcaagaaggttaaactcaaagaggtttgcaccaagatacaatatgatcgagttgccagaagacaaggggaattttgaaagcaggaagagaaagaaagacaacatggccatcacaaggctgccaggggactttgagggagcaccttgcatggcagaagggaggaagatggcagcttctgatcaaagggctggaaaaaaatcctgccaagcgacaataggagaaatttcccagatgagcaaaagcggttgagcccttcatcaccactagctcagaagagggttagcatataagcaagtcaaaatccaccgcactttaatgatagtgaagaagtcacttttaattctggtacagagattttaaaacatattttgagtaaataagaaccaatcaccaaagaaaagccaaagaccagatggcgtcagtggagactcatagcaaaaattcaaaaatagaattaatgtcaatccttcccaaactctcccccaaatgattaagagagtggaacacttccagactcctttgtaagtccagcattatcctgataacaaagccagacaaagataatacaaagaaaaaaaacttcaggccaatatccccgataaatatttgtgcaaatattactcaataaaataacagaaaatggaattcaacagaacattgaaaagaccaaacaccatgaccaactaggatttagccctttgatgcaaggacagctcaatatacaaaagcaatcaatgcaatataccatcttaacagagtgcaagataaaatcatatgattacttcaacatattcagacaagtttttgactgaattcaataatgttccatggaaaagacacaatataagaataagagtaaattattttaagatcatgaaggccacaaatgaaaacatattattttgtacttatatgtgtatttattcactttctttgagtttgtggggcttttgtttgtttttaactttgttctctttgaagaaactaatgctctaatgcagtcaaatttatcaaccttccagttcatattttatgagattttttgtcttctaaatatggtcataaaaataccttcccacattttttttcctaaactgtttataatcttctttttaaacttaagtgttgagtctacttgcaattagctttttggaggtttattttaggcagtggactggttcattgctgtccttcagtatggcttccctgttgtctctgcactgtttatttagtatgtcttccttctctctgaggtccacaatgcccatctgtggtaagccaatccccctccccggggtctgactccagctggtctacttgtttatccctgtgacaatatcacaatgttggaaactgttcagagctttatgtcaccttctctactcttacataaacttaataaacaatacatcgtgatgctgactgaaattgtgctgaatctttaggtcatttttctcaatttttaaaaagaatttcccatgtctttttaaaattcttataattttctccaaaggggttttacttatctttggttggattcatccctgggaaccattccacttttaaactgttgataatgcaaaaatttcagtgtgtgtgtgtgtgtgtgtgtgtacacacgtgtgcacacaaaatctggaaccaattggcatgagaccaacgccaatagtttccaccttctctgagtaacactttcttagtgttaataatagtgggtcccagtgaacttcagttcccctcttccctcaagaaaacaaaggtgtgaccaggaccatcactgcttagctgcaaatcacagttatagtataaataaataaataaataaataaataaacataaaatcattagcaggaatgctcctgtatacaatgcagtacttttccaatagtcattcaaaggatgccagtcatgatgggaaaaaaggaagctactgagtattattaattactattattattctattattggttttttgagacagggtctctctgtgtagccttggctatcctggaactcactctgtggcccaggatggcaagactaagtattattatttaaaggtggccagcagctttgaattcttcagagacagacatcacgatataaatgctgggcactgctgttttaggatacaagtcaatcatgaaacacagtttcaagaaagaaataatgctcagttgtgtctcagaaagtctggccccaaatcttcattgtgcatgtgtttgttttcataggactaaatctgccttaacagatctttaatcagttggcataaaaacacagaaccaccatctgtgagtttaacgatggaggatgggggtacacactgacaagaatccagtgggcaagcatggaagtcataaagccaaccagacagccatagactggccacaaaaggcagagcctgtgagctcattcattcagccataccagttacccggcattttaatatctattgagtaacttttcttttcttttgcccccagatgattgaaagaatgcaccaagactggatggctgactcttagttctcagagaataatctgtgagaattattattctttaaaaaaaaaaaaagatgggtcaaatgtctcctgagaggcctgagggttctaagggtcttagagtgtctggaccaattaacccaaattcctgaggacaggatacaagagaaaccaacagtgaggactgcaggtaaccttcccacccgcacacctaacttactgtctccaatgtgctatgtatctgtcagtttgctttctgttgctgtgataaacaccaggaccaaaagtaacttgggggaggagagggtttgtcaggctgtagtcttgtctgttaccaagggaagccaaggcaggaacaaaaacagagaccctaggagaatgctacttactggcttgatcccatggctcgctcagctacctttcttatataaccggggcccacctgaccgggcatgacaccacccacggtgggatgggccctcccacagattagcaaccaagaaaatgctccatagacatgccaactggccaatttaacaaaaccagtttttcagtagaggtcctctcttcccaagtgtgtcaagttgacaaccacgatcagccctcggagcattcaatcaaagattgagagatggctctatgcatctgcttggagagtttgggatgtattcctgaatgacatatatctggattgctgatagctatcagagttcatgacatacatctaagtatgtgtatcttacagcacttgtcagttcatccgctgtgctaacatcgtgactgtggagagaaggagacttgctaaaatgcaaaacccaggcataaatacagcacccacgatgcagcgtggcttcaggtaccaggccctcagccttctccccagcaagcggcaggccgctggtgtgatctctgggtaaatgagtacagttagtgggagggaccaggctggaagatgaagcatttaccaaatgcaccagcggtccacccgtcctcactggtggggaccccatctccccatgaacacatctcctgccattccaaagttctagaagcagtggcctgcaagtctgaaaccttcatcatgatacgccccccccccgccccgtgggctgccatgagccactgaatacaagtaatacaatggcagtgagaacaagaagacccaaaagggggctggagaggtggcttagcagttaagagcactggctgctcttatagaggatctggattcgacttccaacacctacgtgatgacttataaccatctggaactatggttccaggggatctaacatcctcttctggtttccccaagcactacatgcatgtggtccacagacttacatgggtcaaacatccatacgcatgataaaacggggaaaagttttaaataacacccaaaacaatagtaagcagaacaatgaatatataagaattttactatgcaccacatatggttttaagcacacacacacacacacacacacacacacacacacacacacacacaccatattccttcacattctgcctctgagtgggggtggggaagataaaatgtaggtgacccattcatgtcacttgcagtggtgccctcagagaattcagaattaactgatccaggagttcagactattagaattccttttccctttgggagacatgtgacttgtaagatccacttccagacagtgtaggtaatgccaaaataataaaagagagagaatcgcaatgatttcaggatcccatggataccaaagccatgtagattctaagctccttctataaactgtttcacatgacctacacacatgtgctcatctactttaaaccctctctggattacttgtaatacctaatacaacgtaaattctatgtgatagttgtctagggactactggcctgcacatgttcacacatttgtaattactttcccaagtattttcctctggtggtcacttgaactcgtcgtagcgtggagcccacagataagcacggctggatacatatggagagtgaggaggatggcttccaaactaaaccctgaagtctgggtgagatactgtgtaagcatgtgtgcacgtgtgtgtatgtatggtgcatgcgtgcgtgcgtgcgtgcgtgtgtgtgtgtgtgcatgtgtgatcttcctgtgaaatgcctttcatccttctaaacatgtgttctattaccagagacagactcctgggagagccccatgggaagtcaccccctcactggagactttacctggaaaagaaattaaaaagtaaatcataggcagatgtctcgaagaacttccctacatcattcctgtctctcaggagctaactagcaagttaaacaggtagctatcactggggaaatcaaattgtgtacaaagctctgtttcaagtcattggtctcagcagtccatgatcttttcttcaatcctccaaacacttgctttgataggtagctgcccctgctcttcccaacagtgacttgggcatgtctatcacatatgaggaaaaagaggctctccaaaggcaagtgtaaaagcacacccaatctgcctgtcagcatggggcctatgctgacactgggactcacttagagtggctcatgccccagtacagacaggatagtgcaaacatgttgacagcacttctcactgaccaaaggaatacaagacaagctactgtgactcacacgggcccaatacaagggggttaggatgattaaaatgcagacaccaggccgggcattggtggcgcacgcctttaatcccagccctcgggaggcagaggcaggcggatctctgtgagttcgaggccagcctggtctccagagcgagtgccaggataggctccaaagctacacagagaaatcctgtctcaaacccttcccccaaaaaatagatgcagacaccagtatgatgcttacatctggatgaagaaagccaatgtgcaaagagcatccctcatcctaccactcaaaggaagggatgaagggcatccctcatcttaccactcaaaggaagggatgaagggcatccctcaaaggaagggaatctcacccagttatgggtgagcatggagcacagcagtccacagcctcatgctgaaacatttcaaggccacatagaacggctactattaaaacacatttggactaagtaggcggtgtctatacactttggaatacatatgtgtgtatgtgtgtgttatgtattatacacacacacacatacatacatacatatatatataaaagaaaaagaattcataaatttgaataagagcaaggttgaggtacatggaggagttgaagggaggaaaaggaagagggaaatgatataattataatctcaaaaaactaaaaattatttttaaaaacacattgctgcttgtaaagctcttgctttgataggtagctgccccccctgcgctttccaacagtggcttgggcatgtctatcacatagtataagcccaacacacagcctcactctctctgtactcagtgggctgccaccatcctttccaagcccaagagtcctgcatacttacagactgcctaactaacttacagactgccaagactaacagtctgcagactgagcttctcctgcctcccatggagagcagtgaaggggttgcaggaagagtccagagggagtgtctgctgtctcataaggcagctcagcgagaatgtacctacttcccatctaaccaacctttgggccttcagcctcctaccctgccaaccataccccagctctgttacccttcaaggacactcaacagggaagcccctcttaaatgtctggttttcagctattacccaaatggcaaatgtttctcagtgtgaagagcagtttagtatcaggttcccagggtgaagaggtggagaggcacccctgccctccccaccagactgttactgaccaatcacaaccagacccctctgccattcttacagctcaaatatgctctctttcttgggcttcgtgacagctgacctgatgagggtatttacagtaaaaggaacagactccaacaaccctgccagggaacaacacccatgtgtcctggtgatagagcactggccctcactgtctggagggaaacgatggcggcagtccactgagtacagaaagaacgaggctgtgtcaggcttataccacccaggcaggcagtgacaaaagctgacaggcaaacagaagtgagctgaagggctggggttacagttcagcagtagagtccttgccagcatgtacaagccccagacattaaaaaaatataacattttaaaaaggaaaagaatcttagaaattattcactccaacgcatcttctttcagtggcaagcagaatgtggctcaggcaactgtgtaatgtcagtaccccatacagctgtgccggcacagcctgcggtctcaggatccattactgattctgtaacctcatgggctgtcttcatccccaggctgagcgggttatgcacccagggactgtcacagcaatgtgatgggagcttacctgttgcataactcaaagggcacctgtgattcccaggtggctttgcttgctttcctgccagttggctaagcggggtgccaagtgggaaagcaggttcgcacacagggcaacaggagcacagacaggttaggtaacctccgagactcagggtgagtcagcagccggcacccttggcctgtgcagtgtggccctgctcactctgatctcatgctctccctcatggcccgctcctggagctgctgagccactgttatccttggcccataacagggtattgttacccaaggccccaggtcagatgccatgagaagacgctgggaatgagacaccacagtgccaaaagagcaggtggaatctggcaagctgcctgctgctaatcgcatcagacaaactctcattgtcgctcctctctattttatggtccccatttgttggctggctcttttctgtgggttagtgaagaaagagctttgatcctgatccaaaaccaacaccactggttgcccatggggctcagcacaggaagcccagtgggcagttcaggtttggatggggtcctggcttcagttccccaaatgcccagattcctcccctatgaacgttggtcttgggtagctgaatgtactgttgatgtctcctatgttggttacgcctccctgggagtcaggctctgtgttatagctacagatgctgggactttgtgcatgggtgctccataaacatcatgggccatgatcatggtgggaaaatagctagggagagaagggtggcagacactgcatcgtctagaacagtgtgccctgccaacctccctaggaccaccaggtcaagggcaaggggatatcttgactcacctccagagaaccaaaccctgctctctgctacctagcaacctccactgagatatgtttagacaccaggaagcccagtgttcacacattcagacactgcacccccagagagaaactcagaaagaattccagggacaatggaaggaaaactctctccccagtctctgaaaggtgcactagagataagggatataacgtcatcacacaccagtaccaaaagccaacaacttcccaaagttgccgaaagtggaaggggcaccccagcccgtgatgatgcgatgcagactcaattctttggctggataccgaggctactggactggtgggagacgacgttccctttagaatatcacaccccatgtctgcttgctatggctgtgtaactgagaggggaccattccagtcctgcaggctttctagaactgtggggcaggaaggatgtggttttaagcaactctaaaggaagtactgcagccattcaccaactcagaattgcataaacaaaggggcgctgtgaacctatgtgtttaacaatttcttctttaaaaattgttttcatacaatttattttgatcatgggttttccttcccccaactctttccaaagccacctccccacatccctacccactgaacttcatgtgctctctctctctctctctctctctctctctctctctctctctctctcacacacacacacacacacacacacacacacacacacacacacacaaatcaaaacaaacaaaacccaataaaaaataaaacaaaaaaacccaaacacaatggcaaaatggtacacaaagctcccacacacatacacaaatggaatccattttgtgttggccaactacttcttggcatggggcctgccctggaatgcggttgctctactcactgatactccattggagaaaattgattttccctttgccagcaggctatgtgtctaacaatttcaaaattactgtctacatggaggaggaagagggggaggaggaggaggaagtaaacggtggcaacgttttgttaggggaaaggattatttttaaagaaatcatttgctacacaaagctttagctgtgacatctgtgagagccgccttcacggacctgtcttttttctaactgtcggaatagagctgtctcaacagaagacacatggctgttcctaagacaggcagtgccgctcgcttctggacccagaatcgtggggttggtcagtgggtgtggaggcgtgagggtggcagcaggccatgtagtcagacttcatggaacacacatgtgtgatatgtaggggctcattgcttctgagaaacagcaggtagagatcatggaaagccatccctgctatcatcatcatcatcatcatcatcatcactggggattaagctcacgaccttgcacacactaaaaacatgctctaccactgagtcacatccgtgggcctggggtgtgccttttagagaactcacaagcctaatcgagtacctgaattcaatgtaggagagtctcacactgttccaatcagaaaactcagtgggagatctagagacttctccaaaggacattggctgcaggaaagctgggcacaactaatttaggcaggcgggaagagacagagggaatgtttagaccatgtacacaatgtataaatgagaatggagtgtagccggtagaagagtctgtatgaatatctggattcaatctccaggactaaaagggaggaggaagaagagaaggaaggggtgaatgagagaatggggaaaggaagaagaagcaagggagaggggggaatccagaggagggggagaaggagatactgctttgttgttgttgaaaatacacattggccgatgtataagccaatctcttggagagtccggaattctagacctggaattgatgtgacaaactcacaaggggcaacctccatgtttcccctacacagcacctgtgagaacacacgggcaatcaggagcccgacttctggacatcaagaacaggtctacaaagtcttaaacctgagctgcaggacctgagctccacagggggtacaatgcacttcctctctagttactctccccaagaactacaaccctgccatctttgtatgcctttagaaactgcacaaacatctctcaacaaaaatcacaccggcccaaaactctgagctcattcagtcaggcaggatgtacttcagaataaggcagcattccaaaaacaatgtgttattcttcctttagcaaaaatgaaagccccctgctttgttcattttcatggcagcctttacccttgacctgtcaagcctgaggaaattccggctttctgggaagggacagtgcctggtcagatttgaacacgatgtcagcagaaattgccttttatctaaaactgacccctggtgctaattatgctacgtatattacacacatgttaccttctgcaatctaggaaatagagttagctgcaagtgaaagtctttgttattgccagttccctcaatctaaatgacagctatgaaaataagcaaatacacagagcaagcactcttaagagttgtcttctccagccaggtgtggtgacacacgcctttcatcctggtatgcaagaggcagaggcaggcagatctttgtggtccgaggccagtttggtctacacagtgagttccaggaaagccagggctatccagagagaccctgactcaaagaaaggaaggaaggaaggaaggaaggaaggaaggaaggaaggagggagggagggagggagggaggaaggaaggaaggaaggaaggaaggaaggaaggaaggaaggaaagacctgtctccttggcaactgcataatgatgtcaaaaatactcataataatactgaagagaaaaaggcatgaccaaaaattctatatacataataaaaacgtttacatatgatttaaaaatacataggaaaggggctaaggaggtgacttggtggttaagagcacaggctgctctttcagagaaaaacacagggttcaatcaccaacccacatgggtgctcacaagcacctgtgactccagttccatgggagatgcaacgcccccttctggcctccagggcaccgtgcacatacgtggtacatacacatgcaggcaggcaaacactcatagaggtaaaaaaaaattaaaatttttaatttaagcagaaaaggtgaacaattctatagccattttaaaagattaaattagtggcttaaaactgagacacacatgtgtcctgactactgggtgtggtggtgcatgctacagttccagcactcaggatgtagagaaaagggggtcatgaatttgaagccagtctgggctccacagggtggctgtcttgaaaattaaataattaattaattagctaattaattaactctccatagccaaaatagctttacaggtaaaatctgacaaactttatcaatacaagttgtggtaggtttttcaagaggggagaagaggaagaaacatttccaaactcatttgatgatattaggataattctgaaatcaaaccaagcaaggacaaggaaatgacaaagagtacggaccacattcactcgtgaaaacagacatgaaactcttgtgctagtaaaattctcctcaactccatccaagctggagtcatctagaaagaagagacaccaaatgaggtgactgtcttcatcagatctgcctgtgagcaagcctatggattttcctttttttaaattgatgattgagatggagggcccagcccactgtgggcagtgtcactcttagactagtagtcctgtgttgtatatgaaagcaagctaagcaagccatggggagcaagccagtaagcagcactcctccatggcctctgcttcagtccctgcctttaattcctgccttgacttctctcaaggatggattgtgacctctaagctaaaataaactcattcctccccgtgttgctttcagccatggtctttatcacaccagtagaaagcaaactagaacgcttctaaataaaacttacatggtttcagttttgttctcttgagacctagacttgctacaggttggccgtgagcgccaaaaatcctataatcacatgtgactattatattaatatgatgattataatatctatggagtatcagttatgtcgggggtacacagcagttcttatgcaaaatcctttcattttcacaagtctgtggtgtgaaagacatatcattccatttcacagtgaaaaggtgcatgccaaatgaggctaagaccaccttgctggatgagtgagtccttcagcagagagtgatggaaccaagagaggaacttggtacttagcatcatcggcttttgttcccatacagacttcgttcaccaaaacctaagtgacaaaatagcctggggtgctggtggcatgttgaggtgaaccatttcttattccatctactcagaacttacccagatgacagattatcttattcctccatcttaaaatcaaatatataagaaaacaaaggtcatacaaacaatttccctttaacacgggggatgccttgaaggtcttggaaactgtaagccagttgtctctaataaactttacgacctggggccgttcagtgttctgaggactcttcctaatgtgttgtgagctcgtttctaacaggccttgaagggcacacaccctattaacctatcacatattttccgcttagtgaaggatacctacccttaattgtgtgcagccatatgaggtgtaatcttaaagtatggtctaatttcttcaaaccaaacatctacagatattttcctgactacataaactacaaagaaaggccagaggtgcctcttcaccggcacctggcccaaaagagtaagaagtaggagactccaaggacagtgtccattggcaccagtaggctgtgttaccaaacaggagtatgggaaacagctcagagggggccaggcctcctacagagctggtttctggccacccagttccagcatactggctcaggggcccagggctgctgagggaggtgccctgctttaacatagcaagctctcattctcgtagaaatggttgtgcagcaggcctgtgttgcaagggctactaaagaatctctcccactgagttcacactgcaaaagcctcctaatcattccaaggggttgacagctgaataccccagggccctctcctgactgccacacccattgcaagtacccaagaaaaatgtcttccttcttggagactgggatcccccagccaggaggccaaagcacctgcctgtcaccaatgcagagctgttcaccagagcccaagagacactactgattcagagaccccatggccatcctgtggcactcctctgtggggttttctgggatctgaaagcctcttggggaatgggaatgtgtcttgaccaatttaatgtacccagtgcctcacgtgggttttgtcaattactaagggactcacagttcttgttgagacaccgtgtttgtaatgccattactttgcacaaatgaaatgaagataacacataatagggccagagacctgaacaatcaaagttaggatggcaaacatgtttccacttagcgacaaatgcagatggacaggtgatggcttcgtggcgtgctgtgttgagcaggagcctgaggtttatttatggggtttagtgaaaaagagaaatcgccaagatcaattgcaggtatccaacaggacttcagagggaaatgtgagtgcatcatgtcatgttctggcaactgtctctaggctaggatcctccctccccaagtctagagagccaaaggagggaagagtgtcctccaatgtcccccaatgaaattagattacaagcagtatgagtctttaataccatatatttcttatatatgtaagatctataaacttaaatgtattaggaagttatctctgattaaaacttaccaaatacaatatttttcttcttagaaagccccatgactggcctatggggtgtggctcagtggtagagcatttgttaagcaagtataagcatctgggtttgatcacaaacacacacacacacacacacacacacacacacacacacacacacacacttccattgcgactccaacaaggcatgggtttgtgatactcgactccctgcttctgtggatctctccctgctttacaaatccagcctctagtggtatcaacatcatatggatttggttaaaacattgcaacctgacttgactatgttcttaatactttcttagcaagaatccttcctagagatgaatgtgtccaattaacttcaaagacataacgacttctttcaaaatagctttgcaaattggtttgttagagttgtgttattttgacacatttggcttgtccagctggccagtttgtcctaggaattccctgttctgtccaggtgcctggattattggcaggccaccacatccacccggcttttatataggttctggatccaaactccagccccaaactcgaaagaccagctgaaaggttcaggcattatgctggcctgcccctgttacctggtggaatccactcaggcggtaccctggtcagcccaaggttccatgggaaagaagtctgcacgcaggtgcagaggacccctttaaaagataggcccctgcccatttactctctctctccttgtctctctctctccccctgtctctctctctctctctgtgctctcccgtctctgtttccccgctctgtctctctatggcgaccggccatggcggtcagccattaccctgttcctcttcttagtctccccattccattctgccttataataaacttatagtcttaagtctcatgtctgtctcaatatttctcttttcttctttttaaacaaaacaataacaccagccatcttcccagcctgggattgttcttttccttgatgtataggtgaacaaatggtgattgagtcattaccaggacacatttcctgcctttctgactggtccatggcacagttcaaccagaaatacatgtctttcaccaattggatcttgaaagtaatgttgccagatactgaaaaggcagttttcctagaacacactccttatgacacaggactggaccatgccaagagttgactgggcatccagcctgccattagtccctgatgtccactcagaacaagggcaaactggtgaagcagtgacagaggcatggatgccggtaccagagctgagggaaagcaaaggcacacaggatttccttgggccacattcatgaccactgggcagcctgcagagcctcctccggctaccttagaagctttgatccatgaatgaaattatgtcatagcagagtcactgcagaaagtgtttctatggtgttgccctgttgggagtcccaagaaaacatgaagcagctctgcccctgtgatgatgagctccagccaagtggctccagccaagaagagactgtgccaccggtgcccagcaacctgagctggtcagctgatctgaggcctcgaggtcatgtcccatcttgtttcatcacttgtcactgggggacaaagcctggattccagctcttcccccaggtttcccagattcctgtattactcagggccctgcacccatgctgtgtctgccccctcatgcccctcccccctagaaaacacagactattgggatgctgggaggattaggtgaggtcatggctacaaatcactaagcacagtttctcgcacatagcaaacactcagcaatcagggtctcccaagcaccctcgttctatttcctgaaatgcaaaatgaatttgccaagtgcctgttgccttaatcctgaagcccctgtgtgttttaagagaatctagaccatatggttcttctcccactcacagataaatcagcataatgtttgtcagtaaaagctgttcaatgtcctcctttttatgagccttcttatccaatgtcctaaaacagtaaggagaataaaagttagttgtgtttgctaagggtgaataaacttgggcttaaaatccatcccaagaactagagaaggactattgcctctgatgcccactaaatgagtgttgctctcaccttggccaccttcacagacctggaatctggggcactgaatccctagcaagagacctatacatcagcggggtaagagtaaccagacagaaaagcagctgctgattcccaatgagaactgttaaactataggagcagtgaattcatccctgggctcagatacagcctgcataaacacacaaagcaggctcccatcagccctcctgcagagtctggagggtcagaagaatgtgcacaggctacagacacctgtagtcacctgggcagccacgggtatagatactctgagcatttcctgctggaggagaaactgctggagtcccacccctcggcacactgccttagttgaccatcacaaggcagaacgaggagctttgcagcactcccctgtccaaggtcactgccatcactaaccttgtgtccaccataacctttcatcccttttgatttcctttgctttgctttgtttgtagttctgggggcagaacccagagactagctccatcaaggctaaattaagctacatcctcagtctccatttttacacagtgttatctcaacctacaaattctggagtcacacggatgagagcagggatgtgtgtgcacacatgcatgtatgcttctgttttaattccattaaaaatgctattaaaccctcagacactgtcaggacatataaaatggtaaacagctttggtagatggaaaaaaaaaaacctagaaatttcttacacaataaatctaaacacttacaatctgactaatccaatttccctcctcagtatttacccatcagaaagaaaagcttgttcaacaaacatttgtataagactggacataattttattcatagtaacccaaatctggaagcagcccagatgtctatcaagagaagaataaacaaccatgataaatatgcatgatggaacacaacccacaattaaaaagaacaaacttctgacattcagaataacatggatatgcctccagtggaatctggaagtcagcgatgctcaaatttggggatcttgggacttctttacattctaaagtattgagaacccccaatacttactaacacatgttatattttataataggaggtaaaatggaaaatttcaaaatatgtatcaatttactcactacaaattgacacattttttagaaaattaactatttcaccaagtttttttttttaaaaaaaaaaaaaagcaatgaacaagcataatggtgcctctttttaaagtttttttgcaaatctcttcactgatctcatatttccccctgcatacactccgttgtggtaaattcttgtgggcgatgtgtggagaataaacagcaccacacaaatgtataattggaaaatcacgggctgtgtcaatagccttctagataatgatggctgtttgcttttggtacaaaccaaaagtccacaaatagtggttccctaaaggttagttgcaatgtaaaactagaaaccatatcaataaacttttgtgctttgttacataaaaactcattgtgactatgtcatggttggaatggaacttttacccatgtaagaatatagccaggcatatgtcaccagtgattccctgagttaagcagatcttagaagtgtttgtgcaggcacaccttacataatacttttaaaatcacatctgttaataccatcactgccctcttatcacaaaggtcatcataccttaggaaactatcaagctctggtaacaaacactaattttacaatattctaatttttgcttgctgatgaagttcaatcaagagcaacaatgtttctagttggtttctctgaaccaacagatcccatctgctacactctagtctaaatacctgtagttggtatgtcagttgttttatttttcccctgatagtttggttggtaattcagatagccatgtgggtgtttttcctgggaccagccacggcacacccaaagcagtagtagccttgggtctccttcccatgtgagcgcacgcagtgtgcttggggggctgagatttaacatggatgctattgaccctgctcatctacctacatgtgaggattagtgaagaatataacaaaaccacaccacaggtgtcagggtctctgcattccaggcagaggctgtttgaccaacaactgccttcacaccaccaacaccaacgtcagtccagtgtaaagggaaaaaaagacaatccacattataaggaaagcaactggtacactggagacttttagcagtctttgaagacgcccagagacacgcagagcaggctgtgaggcctgccttgccatgttcatgagcaggctcgacaaaagagaagacattctgttctggtgcctgcaggttccatatccacagattcaacaaaccctgttatagcctttggaaatactcgaaatgaaggggaaatgagtgtattgaccatgtagagatgtctttgttgtcattccctggacaatgcagtgtaaggattacttgtagatcgtatactgtgcggctggagagatggctcagcagtttcgagcctggactgctcttccagaggacctgagtcttccatgcccagggcctccttgggcatgctcacacatgcatacacattctctctccctccctcttcgccgccccccccccatttccctctgcctcagaggacacccaggccacctctgacccacctccagtcctcctacaaacactgtctgcagtgagaaagcatgggggacgctgtctttccctctgattccttctgtctttccctctgattccttctctgtctgtggcttgaccccacacgtcttcatggtaatgtcagcagcccatccttgcattgcagtggctgctgtttcagaagtatttggatggagactgcatttcataagactggagaaaaaaaaaccaatttctcactaacataattctcccagtgtcactttggtacttaattgccaccatgtgccttctctgacaccagctgatagaaggccagccatcagaggtcacagcaaatggggctgtcctgggttggtgtttggcttttatggccactgtcatcccctgaggcctgtttcagcccatctccactttcccaggcttaaacttgagcatcttgcagactgaagagagtggagcagtgtgaaaattctcactgagggtggccacactgctcaggctggacgcctccacacccacccaggcccctgagtgcacatcccacatgcacataatttctattctgttttgaaattctgtggttttctagaacaatgctggtgttaaggaaaaccagctgcaaatgaactcagcctctcttcgaaagaggtggaatttcatgcctcaaagagcacatctcaacctcggccaccacccctacacacacacacacacacacacacacacacacacacacacacacagacacacattacagggtcctgaagccattcaggccacccctctgtaaggttctgtagcttggctccctgccatcactacagatgaccaagccctctgaaactttacgcctcacacctcatttcttactccccaccgctcccctcctgtgctactgcagagtgcagtttgccaaaagggcttcgtgaaggcatagggaagaggatgacaatagcccttgggtcacttgacctcactgagcctcagagaaaaacaaagccagaactaatttgcaccttaagaatccaaacccgagaatgtgggtgtcagttacgaggcctgaacaatcaatggggcctctggtagtggatcagtgtttgtccctggtgtacatatagactttgggagcccactccacatggagggttactctctcagactagacatacggagaagggcctaggccctgctccaaatgatgcgacagactttgaaaaccccccatggaaggcctcaccctccctggggagcagaaaaggggatgagatgggggttagtagggggcaggggaggaggagagggagagggaactgagattgacatgtggaacaagcgttttttaaaagtctgtttacaaagaaagaaagaaagaaagaaagaaagaaagaaagaaaggatcccacagtgggagtcgggacattcgtcagtgggcaagttgcttcctgcacaaggacctgagttcagatgcctggcgcccacacacaagctgagcaaggtggcctgcatttgtaaccccagggatagggtatgaggtgacagggggtcgtcagagctcactggccaatcagtctacctgaaatggtgagttccacgttcaccaaggggccctgtctcaaaggtaagatggagagatagaggaagccataagaagtcaactgtggggccctgcacacctagctacacacaggcacatacacacattgtggtgatttgaataggattgccctcccacaggctcatatatttgaatatttggtcattagggagttgagctacttggaagggattaggaaatgtggccatgttgaggaggtgtggccttgttggaggaagtgtgtcactggggtgagctttagggtttcaaatgctcaagccaagcccagtgtcagtctctcttcctgctgcctggagatccagatgtagcgctctcagctacctctccggcgctatgtctgcctgtgtgccaccannnnnnnnnnnnnnnnnnnnnnnnnnnnnnnnnnnnnnnnnnnnnnnnnnnnnnnnnnnnnnnnnnnnnnnnnnnnnnnnnnnnnnnnnnnnnnnnnnnnnnnnnnnnnnnnnnnnnnnnnnnnnnnnnnnnnnnnnnnnnnnnnnnnnnnnnnnnnnnnnnnnnnnnnnnnnnnnnnnnnnnnnnnnnnnnnnnnnnnnnnnnnnnnnnnnnnnnnnnnnnnnnnnnnnnnnnnnnnnnnnnnnnnnnnnnnnnnnnnnnnnnnnnnnnnnnnnnnnnnnnnnnnnnnnnnnnnnnnnnnnnnnnnnnnnnnnnnnnnnnnnnnnnnnnnnnnnnnnnnnnnnnnnnnnnnnnnnnnnnnnnnnnnnnnnnnnnnnnnnnnnnnnnnnnnnnnnnnnnnnnnnnnnnnnnnnnnnnnnnnnnnnnnnnnnnnnnnnnnnnnnnnnnnnnnnnnnnnnnnnnnnnnnnnnnnnnnnnnnnnnnnnnnnnnnnnnnnnnnnnnnnnnnnnnnnnnnnnnnnnnnnnnnnnnnnnnnnnnnnnnnnnnnnnnnnnnnnnnnnnnnnnnnnnnnnnnnnnnnnnggtctctaaaagaatgattatgagtgttcacagatgatttcagaaagccagtcaatgcttccggttctcatcactgctgctctgaataagaaagagatgaccaattctcaagcaggagtgtgatagccagctcttctgtttcctagtcccaaccatcctccttgctcattgaacaccagtattttggttgattgattgattgattgatggagacagagtctccataaaacttgctatgtagctaaaaatgatcttgaacttctgaccaagttctgagcttacaaacaggcactcccccacccaattcatgcagtgctggggtctgaacccaggtccacctgcatgctaggttggcacactaccaactgagccacgcccttagccctgcccatcagtcttcaatgtggaattggcaatatgctgctaggagatgccaccaactctcctgggagaaatgggcagtggcctttgtctctgggtactccccctccaacctcccagcaatcctcccacaataaacagcaccccagaacttggccagtcctaggaatcatacgaagtggagtctcccagcaaccctgaaagcctcagagacctccatggggcaaagccagcaacctggagaaagacctctggtctcccctgccacagacacctctaccaagaaaagcaccaacccaggcagtctgccttgaaggaacaccttgctgcagctgggagaaacgatctgtcaaacacgcaggggctacaggacaccactcaagacagaggcacttgaggcagagcccagacataccaatttccaggaaaaaaaaggctcttcttcatctaaaacccagaaataattccagagaacacaaagcctgctttccaaaaggctacaataaatcaatttttcttgcctgtgtcccatctagatgtaggcactcagtttgtcttaataaacaagttagtcattcaaagggaaataaatgaaatgttttgccttgagggacagttttatttttaatagtttggtgctatggcgagagaagtaatattccatgatctgaattgccttttgttgctggggaccactgaggatacagtgggggtagtgtggggaccttgttcaggaacacaggagcgagccctctgtccagcaatgtgtgcttcagctctcggggggcttcatttaaaggtgctgccattcgtctgcaggaaatgtcaacaccatgtgggtgctttgtagttgtttttttgttttccttttaggtcggtcattccaatgaaaacacagttcagggactggggtgtgagttaggggaagggtgcttgcctagtatgagaaagacgctgagttccatcccccaaactcaaagaaggggaaatatggaaggagaagcttgtcttgaggagataatgggtgagatcattatgagattggggctggaccccctgtgcatgagaaatcttggaagagtagttccagccaaaatcctgtctttctaaaggaactccaagcaccctgcttgctccatctccatgggagataccaaagaagactctaccaggaccctgaagtcacaaccctgaagttcctctaagggtctttaatgtaccctgctacccaccacgttactgggaggtggtggcagctttcagagttgaggcccagtgggaggaacttaaatcattgaggtgtgcccttggaggagctactgggaccctgtttctcctcttgtctttgcttcccagctgccatgagaaggccgggtcttgcccgctctgttgtgtgtcaacaaagccagtcaaccatgctctgaaacctccaaaacagtgagcccaagttaacttgtcttcttagcaagttgatttcttcaggcatttgtgacaaaaacaacataagggaggggggtttacttaggctcacagtttgaaaggttacagtccctcaggacagggaaggcatgatgcaattcatggaggctggtgactgccaggggaacacgaggctgtttggttacattgcagtacaacaggaagcagaaaagatgggtcagaacataatacctatccacacttgaaaaccatgcagagaagcctcttaaatggtgatagaaaggtctgtgactcaaggaccatttgtgccccttatattcaggagtctactgaaggacaggggagaactgagcctgaccaaaccttcagccctgtgtcccgtctttgccctgaatcctcccatctacagtcctccatgccagctttagttatgcccctgcatctgcgtgctgtggagggttaaagtttgctggccctcttcccaggaagaaagagaacatagcctgttctgggggtgggggaaacacaggaagagcaggagaaacaggaatttgcagggttgtaacatgcaacatctatttctctggggtttcccacatgctagccaagtgctctcacacacatgagcaaatccccaatcatcagcaatcgcctagctgccaggaagtgaaaagaaaaagctgcaagggtctccatgtgagctgatggcctggagtggtcatggggccctgtcccagcttcatcagcctgagggtctgtctttggggactaattagagtaaccaggcccccttcaggtctagtgaatttcctctctctacagaggttcattctttaaaagctggagatgacctaaattgttctgaaccaaaaatgaatgtgcttaatgggggtggggtgcggtgccctgactacattggcattctacccccaccgtggaaaagccatgtttatctaaagggtatcagtcaatagacctaaaaatgggctaaggctgtttattaacttgagctttagaggaactaggtcagcttctcattcagtggtagctccagggaggacacccacaagcaacaactagaatcttctggtaattacagtcgtggaaagtgctggttgcaaaacaatttcattcgacccgtgggtgttaaatgctcattaaatggatggtgctacactaaagagtgctctgtgacagacagcagcagggcagaggagggtgggcacacaacagactcccctgtcaccgtagtaccctctcggggcaatgccacagagagacacagcagcggcttagaggctaagaggaaagcagtaggattcacatgaactgagacccggatctgccactctgccccagtgaggaagaagactaagactggctcactccacaaggtttcaggcaaggctttaggggttcggggaagctcacatttgcatccacccagaattcagatgctgactgaaatccatctgtctacatgaggatgttgaggaagagcagatgacacactgggggccacttgagagtctgcacccatccaaagtgacggctccgttgggaggtagtaagtgtcctgcaagggaaggaagatctaatcccaacctccatagcttctgattggccaccagcgaatctctagatctccagctactgaggttgacagtgtgtgtgtgtgtggtgtgtgtctgtgtgtgtgtgtgtgtgtgtgtgtgtgtgtgtgtgtctgtgtgtgtgtgtgatgggggggcggggacaggggcagcagtgtggctcaggagcacttggcattgacctatgtccccatatgtacatacgtacacacatacatgtacacccacatgcagacatgcatatacacacataaacacatctatacaacacatacaaaacatgtctagcaatcagtcagctgtggtggtgacaatgacaactccagctctttggatggtgggtcactcccggagagcagctttctgccattactaactagaagcgcctcagccacacagagtctggcttggctgtgaactgggccttcttatgtacaagggaatactacaacagcaacagttgataaggctttctcttcaaactcaccactgggacacacactctcagacacaaagcctgcacagacattcccttggcgtgaatgtaaaagctgccatgcttcctcgggatatatttttggactggaaaaagtaacacgactgtggtgtcccaagaagaaaagaacattcccagtggaaagaacagaggggaaaatcagcaaatgatttcctctgcctgggagcttcctctggggaagaaaacaaaaactggagagacccgggccatagtccatttctgtggctattaccgaatacctgaaactatttggtttataaagaacagaaagtttctagaaggtgggaagcccaaggacagtgctggcatctggtaggggcttcataacatgagaagggtatcacatagtgagacagagcagacatgctaggccactgatgttaccccaccctcatgaactcatctgaccccaataacctcccacctccaaacatcaggaatttgtgggtccaatttctaacatgtaagctttgagggggaccctagatatcccacagcaagagccaggtggtgaaggaagggactggaaacatcctccacccctgagctggtaacaggctgagctcttctgtctggagctccagggctccaggatctgagagccagtctctcatcccagaacaaccccttaccccctggttactggagacagtgtctcatgaagctgaggctagctgagtgctgaaaatgaccttgaacccctctttctgtcctctaaatgctgaaattataatgtgaccacagtgcctggctctgaaacccatttctcctccagcttccgttctgtgacgactgctgccaggccctctctgctgcaatgaagccactctgctgagatagagagagaatgaaatcacccgggtaacactgaatttgccttcggatttgactttcctaccattcaaaaggattgccctccctcccgtgtcactaggctaccctgaacactacccagggggccacatggaacagaagtgcttctgacccctccatcttttctgtgccccgagaccccacacttgagctagtatcagtgcaagatccagtccagtctatctccactgaagcccagccaacatcaccatgggaatgtcacactgcttggcactcaccaacctttaatggctcccgggtgccaggcaacaaagcccatgctggaccccacatctgcctccagcctgtgctccaacggttcccttgtctgtgccacattctccacccaaagccacagggtccttgtaaggatcctcgtaagagtccagtctaagttcaaccccggagtgctccatctctctactctcctcctgccagactttcaccataattccagtttctcggtgaaggcctcctagatcagactggacgaaggggtcacctgccctgccggagcctggtgactctgtctgtgccacccccgcatcagtgatctccttaggtaccttctcgttccttcccgaccctggatacgcctctgcactcttccctgttgagtttcgactgtgtgttccccaaaggctcatgtgtcctaagcccattcctcagccggttaccaacaggaggagtgtacactgcctgactgtctgtctcctgctgcaagtgtgaggcaaagctaggacgcatgagacactgtttcaaaaaaataaaaataaaaaccagtgtgtttgtaaagagacaaatagagaaaagaggtggggcctagtgaaagaagttagctcactgaagacaagacctatagggctagtgttgaattcatccccttcgctttgtttaacttctcagcaagttctccccatgggtccaaggcaaccgacccagatgcacagactgaaccttccaaaactatggccaaagcaaaatgttcctcttttgaagcttatagtctcaagtatcttttcacaataactaaaggctgtggggcacttccctattatctgttcattaacatttcttaagtgtctggtgtactctaggctgtacaaggatacaaggacgggacaataaggtccttgacccccaaagagtttacactctgatatgtaaatgacagcagcatccagtaaaagcacgcaggcacttagtattttctcccatcaaccctgagtgcctgacagaacagacagtgggacagacagcaagcaaaccaacactacacagacagccacaccgggtagctgcagacactctaggacatagagtgggctagctaaggcctccgtggtctacagtgctgacctgaaagtcggcatcccaccgcctccatcaacttttacacctaggcttgcgtccacgcctcctcagaagccctgctattcactctacaacttagcctattgtagagatgttggagtctgggtggcaagaagggaataaaaggcaaaggaggtattcccagtcaacggggacctggccttggcatctttaacctcaggactccccatgcctgtggaaggaaagtaaaccccacacagaggtagcccatggctggctggatgaggctgagggcatgtgactctccagcaagcctgcttattgtataaccttggcaaaaacacccctgaaaacgaccagctgtgttgattaggaagtccaagggcctgtgctgtcatggcgggcagatgcgtgtgaataccaggacactggaccttggtgaattagccgctaagtgagacaaagggctaaaatatgttgttcagaacacctcattaataaaattcaaaattgttttctgcaattatgtgcaatctttcgttattttacccccagccaagtagaattcccacagccaatctatagctttggtttcgaatgccaaggaaaactccctggcacacaggggcgaataggagactgaggcttagagaccagaagcccttgattagctaatagagaataatctagtgggaaaagaagcctgtccagaaagaaagaaagaaagaaagaaagaaagaaagaaagaaagaaagaaagaaagaaagaaaggaaggaaggaagaaagaaaggaagaaagaaagaaaggaaggaagaaagaaacccatgagtgactgtccaggggagagtgtggccacaaagaccacttcctagttgatcttgcagccagaaagcaaatggaagggctgctctctcctctgacactctatcctgctgtagctcccactcacttcacatatttcaagagacctaacaatatcaacagtagtctgataaggaactggagaatgtatcccatcatgtttccccaggaaagtcctgcctcaaatccatgcaacatctcctatttgcgtagttcagtcaggcagtcattgttcatcaacattgcactgtctacaccaaggaccatcccaggctttggggtccctggcttcttctgaggacttgggctgaggctgtcaaagcacaacgcactccaccatgctaaatcaggcttttatcattccaacctgtgagagtcgtctaaaccctgaatcccattatgtgtacatggtggggatgacaggagattttcacattcttagtttcttacattttctgcttctctaccatggcatgtattacttttacaaaagagaaaaacctttgtttcttactgaaatttaacctgttaacgcactaatttcagatgctcgctatttggagggagataaaaggcacgtgttggtagctaatatcaagaaaattttctctacagacaacccaaacctcatttagaaaacagttaaactttactcagccccagctttctgttgtggtggtggctatttaatccatcagctggccacagtgctctgaaaccagcctcttagaatccttctagtggcaggagttagtcacatcaaagtcactgtaaggaatttaacagggacaagaaaaaactgcaaaggagttgccccagtctctgagttctccactctaaaattctttatttaaatatatatttggtttccttaaagggcaaagcaaaaagaagcaggagtagcctatggtcagagggcccatgggaagctgcagcctgccctgagaggcacacaaactacacatctgtagctcacaggggcatgaggaccacatctggctactgagcagcagtgccctcccccagcagccttgcactgtcttcctcaaagcaaacattgaggttggtgctcccgatcaaaaactgcccacagttttgtgcataaactgcacggtagctttgtgcatatgtgccctgggctatgctgcagcctgccgtggttctttcaaagtcaagaacaaattatggcgtggagcaaacacgtgactcaatttcagcaattgtcttaggttcccactgcctttcccaactcctggggaaatcggctcaggacacctcacacaaaagacaatgggccaggggagatgcaaacactggaagaagtgagtgggtaccggtaggatcccaggcatcacgccccattttctgatttctgttaccaactgcccagttactccccataggagggaaagacttttagctgagttacagtccaagcctttattggaacttggagaccattttaaaacactgcatgtgaacttatgtgaggagcctaaggcacaaatccatagaggaaaagtcagggtgtctcgcctggtctcagagcacagccagcttcccaagcagaacggcttccccaggaaggatgttctgctgtcaaccgggcacccttctcagaaggggagtctcagagagacatggtggcaccccagcgatgtcatggcaaaggagtagctatgtcattacggtggaaatgtcatccccacagcattcttacggtcatcaatgctacaagttttgattgtcagtgtatctttccagcagtttccctggattcttaggagaagttccaatatggtggaatcgtttctctgccctagttgctttttcctgcagaatagggatctgtttacctaccacacaccttaatgatgatgctaccgtgaattccagcaaaggctctgaagaaactgcacctacaaacaacaataaagcatactaatggtcctttaaatagaatctggtaccctggtgtgtgcaaactctagtgcgtgaagcaggctttcggaaggtagcacaaggatgctgagaacacacagatgcttgctcctttacagccccaatcagggctggtaactgagcagttaagaaacaaaggactcagccatgggggtatggggggaagctaacccctgagtcttttaagatgcttatttgttctgaggtagacacagaactacaattttccagaaccttaaaacataggtgtatttctctacagtttcatatttggggggagagaggaatccaaacagcttgtatgccccaagcacgtactttgctcttttgaattttttccaggactcatatctgagtctgtcttaagtcttcagaggagaatctggacagggatgttccagaaattctgaacagttaagacttaggggaagcttgtaatcagctgagtgcattttgcttgtgcaatggagatgtgcccttgtgagctgggagaggaatgctaaaagtttgggcctggcctgccccaaagctccagaggcttgtccccagcctgtggagaaatggtgaaatcttccagaggaaattggctggagcaaggcatcccatcctttgtcttcctccttcctgaactccataaggttatgaggccctcttcccacatgacaggcccaaagcaacagggccaggccagtttggatgaaaccacaaaccaaaataaaccacgtggggggctgagatggaaggacactgtgagctaggggcccggagtcagcctgagaaatatcacgagaccccatgatgagaaaataaaatggttcatttcttagctcaacataaaagttaagaggggacaaatgctgactacatgctgactccagggattggcacagtgtcgctcacacacagcctctagcatctacaccacagtctgtctgtgtagacatctacagggttagggcctctgctgaaagaagggaggagcaagccactcatcttgaaatatctagggtaactgacaaattgtgctgagtgaaaatccatagagaaagaggcagaggggaaaaatacatactgtgttaagcaactgagacgcagaacccatcctcggggcagcccctacacagaaactgtccatactccagtttcttatggagccaaaatcagtttcctcacagcttcaattcattttcaaatgcagagattgggattcagaagatgtaatcagttagccagatgttctccagtggctgaggcagacagatcacaactctgcatgggcagcctgagcaacttagtgggactttgtctcaaaataaaatagaaagccaggcctatcatcccaggactagagagacagaggcaggaggatgaagagttcgaggtcagcctcagctatatatcaagtttgaggccagtctgggctacatgagaccttgtctcaaaaataaataagtaaataaacaaataaatagaaaggtcttagttgagcccttgccaggcatgaattattaagtcgtaggtaccatcccaggcttacagatgggatcggataattaagtgccctttccttagctgagacaactttaggtctgtccatatctaatgtccacagtctctccactaacccttggcctgtctcctccagtttagatgaattctgtgatcttttcccaggaccagctgaattagtactgaggatgcctaagaaggaaggaggacagaggccagtgccataaagcacatatatttcaactttcctcccaccatatccccaggtctttctgaatgtggccatgacagcaggaggccctcacggaaggactgggggaggggtggtacaaagagcccagttctccaaatgggataattgaggacatatgtctgcctggcaatcccaaagaaagctgccctgtaatttttatgccccaaagccataacatggactaacaggcctcccttccaacatccaggccgacttataaaacggagacaacctaaacaagggcaactttaaaaccccaacaggaaataaaaagcctctccccaaagcatgaagtcagggctgcctcctcagatacaatcagactcctatggtgcggaatagctgggggtgaaaaattatccccattaaaaaaaattcctacagaagcctggcaaaattagaaatggcttccttgccccaccagcccctaaaagggcaggttgtttccatctgagggtgggtgtgcgcagtggaaaatgacttctgctaacagttatcgttgctttctccaggttgtggacatgaggaagtgaagagctgactttatgttacagcaaagacctaaaacctagaattacaagtcatttattgtcggtatccactgcctggctgacgtcggggttataaaggagcaattatccaagtggctgatggcctttctgaatgcagaattctggtgttcgcaaaagaaggtgtgcaggactgtgggttgggaatcatctggaaacacagagatcggactccccagccacaccttcctggtatggagaggatccccagttctctgctactgtatctaaacctaggcggacaaccctgctcaccccactgctgggatggcacacacacacacacacacacacacacacacacacacatgcacacacacacacacacacacacacacacacgcacacacacgcacacacacgcacatgcacacacacacggcacacgtgcatacatatatgcactcgcacacacacgcacacacacacatgcacacatggcacacgtgcatacatatatgcactctcgagcacacacacccaccacttagtcccatggatactgtaattgttgtgttattgcaaaatggaagatggctcagcaagtaaagacacttgctgaaggagcctgtccacctgagtaagcaatagagatgaaaacaaaaacaaaacaactgaatatcctcagagcctaagacggaaggagagaagtgacccctgacctccacatgtgtgacatgtgagtgcaccctccagacacacatatgcatacacaataatgacttttcactcaattcaaacgggaaccatgtggcctgtcggtgtgtttatcctgcagtagttcagaggcaggaagggaggggcggtgtgaatgctgaagtgtgacactgaactagttcctcacccctacaggagagctagagccaagagccagctctcacaccagcgccagctcggagctgtgtggccaggagaaaatccctgggctgttgtcattcacagctgacctgtgtgtaaaataaggatattgactccctctcgggattgctaatgatgcccaggacacagttttgaagaaaaaaaaaatcttgctgtcttttgcacaaaataaggaaaaagagacatcaacaggtcacaacaaggaccttcgtcctttctggaaaccacccagcactgaagcttaccacacagccagagctgtacctgctcctccacattaggatggagaacgttgggggaaaccggtgactcccaagtcagaccacacctgaaacccaacagttacaagagtggtttcttaggcataaagcgtgggtcctcaggaaaaggcaatccctgccaccgggaaaacacagctgtgaccaccccagcctctgtccctcactaatggtaacacttttttatccctttctagaaacaaagacaaaaaatgaggataccagaggcagagacagaggcagcagagtgagagctagcctctaaggacaaagaaccctgagttaggaggctgggaactgatgagtattcatgcacatttccaaacacaaagatcctgacacactctctggggatggaggcagcgcatctgctgtgcaaccttcccgttaatgatattccaaaatatttaggatttcagccacaatattcctgcctcaaagccgctcaagctgaagaagatttaaatattttgtctaggagattatcagggctctagacaagatcaaccagactcaagagaccaaggaggaaataaaaaccggtttctgaaacccagctcctcgttgcctacaacgttcggcagccatggtctccctttccttcactaagcatctgtgagaaggagatttaggacagaaatgagatgtgggaatatcataggccccatcttggaaattaaaaataaataagctagcaaagaaacagtcttctgggaccaacatcgccatgcattccttgtgggctttttttctaatcccataatacattaccatcatctatcaagtgcagacacgcagattcctatagatttatcactgacggaccaacagaccacaacctgaatgaggacatacgctgagtttattgaccgactgaccataaggaagatctggtggaaatgtttgattcattgtgtttctcgataaactcttttagattgcatgtatgcatgaatgaatgaatgaatgaatgaatgaatgaatgaatgtttaagtgactgcctgggatggatgggtggaaggatgggtacttgagcagacgtgtgggtgggtggatggatggatgaaatggggagatgggtggatgggtgggtagatgagtaaatgattagcgggaaagtagatggtggatgaatgggctgaaggctgtgtgaacggtaaattgatggctagggaggtgaacagacagataagtggatgggtgtgtgaacatatggtacatgggtggacaaatggattaagaaacgcatggttccatcaattccccccatccagccacttcctgtcacccaacagagtcctcagcaccctaaaggagggccatccacatgcatgcgatggggacagtgtgcgcaccagctagcactctgccctcttggcatggggattgcttgccactcttccttcgcgcgccagtgaaaggacacgtaaattgcatccaagggaaactgaaatcgatgaaagtttgagactgaaatatgggcatggcagtatacgcctgtgatctcagtgaggattacaagttgaaggccagcctggactacatagtgagaacctaccaggaaactaaacagagagaaggaagggagccgaggacaaggtagggggaagggaggacaggataagtttgagggaaaagatttcctgctggctcagagcctggtgaccagctccgtcacctgggtgacatttttctgcacttggcagcccccatctctgagatgaatcaagtatgcttgaacacccttgggttctgctcggcctgaagcctgcttgggactccagcctcagataggctcatgcgctcccgtctcacccccacactgctgcaggctctctttccgccgccagctgcccactggccgccctgtctatgtcagaagccaccattatacccactctccgcgccttttctcttcccactacacagctcactgcagtgtaggcctcatgctttaatgcctttaatgcctgtccccaccctggttatgtgactcattactgtgtagttactaagtattcggcttgctttaatcaccctgcatgagctatttactttaaatcctacaacagccactgaggtagactttcatcattcctgtttttgaggctgtgagacacaggtacttatccaaggatacacagcttagtaagtgactgactcaggatcggaactcaagccctggctccatagatggcactgataatagcatcaggatttgacccaccttggagcaggtattgagtctgctttgatcacattgtatcagccttgttgctgagtgaggtagccttgaacaaaccacagcatctaatggcagggagagatcctatagctttcggctgtttcattttattttctttgttctgttctattctctcttggtgctggggtggccccaggtcttgtgcatgctgggaaaacactccactcctgagttccccctctgacctcattccatggccttttctggcctgtggattgattaaagccatccagttaggacggtgcaggggtgggctggaaaccactgggaagtgcgcacatactaaacggagtcatctctgtgaaactcaggcccctgtgggtgtgctgagcgatctgaggtcatcagaaatccattcactaagtaccctgagtcctggttacctcccacatcgtgcatttccttaactttgggggattaaaacgtcaaaatatttctacatatcactttaactaatataaatacacttccccagtggtgctttcactttagactcgacctcaccttgtttacactgagcgagtattactcattcacatataggtagacatttttttctctctcttttctgtgtttgactcaaactcggagagctgagcctgccaagccagtgttctgcctccgagccccattcccacccttacacatctctaagtcgagtactgaaaataaattctcatgaaagactccttggagctggggaaagcgtcacattggtaaagcggctgccatgtaagcacaagaacccgggcttgatccccagaacccacattttttctgggagactgggagatgacgcaatgattaaaacaattgtcacacaaggcaggaggaccagagttcagatcccctagagtcatgccagatgggcacagtggcctgcctgtaatcctagcctcagaaggtagaaacacaagggattttcaaagtaagctacctcaggagacgagctgtattagtgagctctggtttgactgagagactctgcctcaaagtctaaggtggaggaatgcttgaggaagatgcccaatatcaaccctggagctacacacacactcacacatgcatgcacacacacatatgcacactcacacacatgtatgtgtgcacacacatgcacatatactcacacacatatacacactcacacattcatgcacacatacatatacactctctctgtctctctgtctctgtctctgtctctctctctttcacacacacacacacacacacacacacacacacacacacacacacacttgattccaagaatctttcttttgccgtctctacaggagtcagagccaatacagccatttgaatctgtcagatcttgttaacactataaaattaaatatcatactttaaagtatgaagcaaagcagcccttggtgtctaggtactaggtctacatcaccatcttcctagactttacacaattgtaattccatgcaacttgctcgctcacagcctggctacccaccaccctcctgaatcaaacaaacaagatgaaagtaaactccaaggctcttccaaacaaggtgcaaatctgaaaaacatgtttgccagtgggaagaggaactggcagacttggctagaaggggagattgaggctctaggtcgatctggatttgggggctcagtagcactcaggaggcagagacagatttgctgtgagttggggaccagcaacacaacagcaagtccagggacagggctacatagcaagactccatctcaaaaaaaataccaagagtaataaattatgaattttgatttgaaactaaaaagaagttttcaagtatagatgtcatcttctggctccacacagtccattgaagaatcaatggactcaactgtgtcttgggtctgaatctctgttagctattgatgcaccaggagcctccttagtctgtgtttgccttgatttcctctaagcaaagtactgcgaactgagctttgtagtagagaaccccgaagctgggttactctgtgcgatggttaatactgactgtcgacttgacaggctctagactcaccaaggagatgagcctctgggtgtggctgtgagggacagatctaattagattaattgagatggaaagttccaccctaggtgagggcagcaataagtaagtcctagactgaaaaaaaggagaaagtgagctgagcaccagcatttgtctctctctgcctctgaatacagatgcacggtgaccatgatataacacacatacatattaacatacatcttgggatatcccaagagctgtgggatttagaaagaagatgatttcaaaactaaagcttaagttttcttattacaaaaacaattgaaacagacttgtgcatctcactgcagctctgggaacaggataagtctttataaaatataaagattaatgattatggttgatacttaagacagagatagcagataagaaatcctagccattggccagcagaattgtacctaatataagtctctgtgtgttacttggggccctaacgtggcggcgggtggaactcgggtggctggcgaaaagatttattgttacaatctacagtccttccctcacttccagaagacaatacacagaatttctaagtgccccagtataagatgattgtgtcacacacacaggatttaaagactgcactccttggaggctggagtgcaaggatgaaggtctgagtgcagacccagagggcccatgtctgttatgacagtaagcatctgttactctagtgctggacacaggcacaggcagatccaggggcttcttggcccaccagtctagccaattgatgagcaccaggtacagacagagacccagtctctaaaagtaagatagagagcagcaaagatacccaatgtccacctacagcatacaaacaaacccattttcacactcacgcatgcacacatcaaataacaaacgaataagcaaatgatatgcatacgtacatacgtacacatgaatgtatgcatattcgtctttattagaagactgggacattatgagactaagacaaaaaaaatactttctccaaatcttagaaaaccttatgaagatgctgagattttagcggatatctgaataaatgtcagctcagcacttatggacacctaggaggaaaagaccttctctgcttgaaagaaaaatgtgtatatgggagtcaggagttgacaatctcccccagtcacacttagaggaatctcacgctgtctcctgtatagccacagtgcctgtaacaagtaccggttgtgcccatggacacccaagaggctacagccctgtggcctccagtccagaacacaaaaaagcctggtgatcctcaagtcttagccatggaagattgcaagccagagatctggttttgacaatacctagcaccaaaggaggaagggcttagacaagcaagtctgtgcaatctaagcacccagcaggctgcccctccaatggaacagtccccaagctgccttcaacactctattaacaccttcaagagcatgtcctgcacagaggacagctctcttcttgccacagagggagcacagcatccatttctcagctttgacacaggaaaggggagattcactcctcactcggaggctatttaagaaagacaactttggtggtagtcacacctcctccataggagagggaccacagccctgggcgtgcccaggagaactggaaggagtctaactgtccatataaaaccttgtgtagacacagctcccctgtgcctaacaacacagaaactttaggtcacagtctactattctattgtggaaatgttaacaaggtgggtttaaccaaggaaacatgactagaatgttttcttaaagaaaaacagtgctagccaggtggtgatgatgcattcctttaatcccagcactcagaaggcagaggcagatgggtctctgtgagtttgaggtcagcctgctctacaagagcaatttccaggacagccaggctacacagagaaaccctgtctcgaaagaccaaaacaaaaaaaagaaaaacagtgttggctctcttgtaccatggcagtataaggagagaatcaaataccctatgcaataggatttaagtgtgtgtgtgtgtgtgtgtgtgtgtgtgtgtgtgtgtgtgtgtgtgtaaaggtaaacgtttacaggtcttatggtaaaatatacacagcactagccatcttgaccatctcagcagcattgagaacattcatattactgcacagccacagccacatccatctctaagacttttttctctagcagacactgtgcctttaaataagaactcaccttccctccactctgctttctgagtttcatgacttaatgtatctcattaaagtagatttgtccttttgtgaatggattctttgaataatgtcttcaaagtatacaaattcaaggaaatcaagtaaaaaaattaggccaagacagaaatcaagaagaatttttaaaccttttagtattgaacaaaaatgaaaacattgcatacttgaatctatagggcataataaagtcagttctaagaaacaaaaagtgcctacatggaaaaagtgggaagccgactactatcactctgctaagggatcataacaaacaataaagtggcttctgatgacacactgctatactcatagatgccagcatcactcatccatcgccagagaggcggcttctcgcagtggataataattaacacacagacctgcaactggacaacgtgaagggagcgagggcctgcgaaggctcagcaccacacggcatatctttatcagactgctccctggggcttaggggtctctgcagcagatgaggcaaaagaccgtcagaggcagaggtggtgaatgtctccaagaacacaccatcttccagacaaacatgactgacacaacatgaactcagaagagacactgtgacaacaagcacaaaccctgaagacgttcaagcctacagaatccttggatgacaatgagaaggggaggcagagtcccaccctcccgaggaagctatgtgcaattgacacctgctgggaaaggggaaccagttttctctgatggagtgtcactggtatctcagccacacccgagggaaatccctgtgcccaggagtagttgtccaacaaagaaaacactcggtatttgtacttatgtggggtgggttttttttgtctttgttttggtatttttatctttttgttagtttttgttttgtttttgctgacaaacagataaagagatggagaaagagagaaatagaatatgatgtcagagctgggcattggtggcacacgcctttaatcccagcactcgggaggcagaggcaggtggatctctgtgagttcgagaccagcctggtctacaagagctggttccaggacagcctccaaagccatagagaaatcctgtctcgaaaaaccaaaaaaaaaaaaaaagaatatgatgtcaggtggtaaagaggaagagaggagctgggaggagctggctgtcagaagggaaagaagatgaccaaaatatactgtgtaaatgtttttttaaaaagtaaaatacctattaattttttaaaatataatgtctttatgaggctagagagatggcttagtggttaagagtattggctactctctcagaggacctgggttcaattctcagcacctataccacagctcacagtctaattccagttccaggaaatctgatgccctcttctggcctctgtggacactgcacacatgtgatgcacagacacacatgtagacaaaacatgcatacacacaaataaaagtttacaaagaataatgtcttcaaaagtcatctatatctataatgcatctgaatttcctcccagtcttaaggaataccccactgtaagcatacaacacagcgactgcccatccacctttggagagaggccttgatactattaatgacactgtaaccatggttacacaagtgtctgttccagtggccactttcatggagtttgcatcaaatgatgattccacagacaccatctgagcaatgccaggctattttcccttggtgtggtggcagcaatggccagcgcccccagctttacagtttgtaccattgatttggaaaacataaaggaaaggccgaaaagtctttcctaggctgaagacatggctcagggcttaagagcgccggttgctcttgcagaggacctgagctcggttcctggtcccaagtggtatcttgaaactttctgcaactccagttccaagggatctgactccctcttctggcctttgcagctcctttagcatgtgatacacagacttatatgcaggcaagcactcatcgccataaataaaaataggaatctcttgttaatctaggtatttcctaaaccaagcaaccaaacaaaacgaggactttaggacttcaaagtaggaggaagaagggagagggaggagagcaggaagaggggagataaggagaggagaggagaggggagggaagaggaggggaggggagggaaggggaaggggtggaggggaggagaggggaggggagggggtggaggggaggggaagaggaagaggagagacgaggagaggggaggggaggggaggggaggggaggagaggagaggagaggagaggggaaagggaggggaggggagggaggggaggggagaggaagggaagaggggaggaggggaggggaggggaggggaggaggagaggggaaaggggagatcttgcttgtttctgcagtgccccctccccatcccctcaccatgtttccccagccacgtctctcttctgttgtcttaaattcttccgattcctacttcagcacttagcatcctcattagttctcaccctgcaaacctgcacatccccgagatcaaaaaaataatctacaaccacaattttggtcatgccagctagggctggaaaacacacattaattccacatcctttgcctatttttaaggtctatactcaacctaccctgtgatgggtctgataaattccctaataactctttgtgttagtcagctttccattactatgacaaaatacctgaaacaataaagttaataaggaaaaaggttgttgtgggctcatggtttcggtggtttcagtccatggatgcatgaccctgttgcttgtctagacataaaaaggagcgacgttaggattcctgcttccaaaaagactaagttgaatctaacttggtgaaggaagttaaaactcaggcacattgactcccaacctcatgacgtttcgaggctgactcacaatggttttcaggcttactatctcaaaaccagtcctattgccatcagtttctgaaattcctttgcaccacagacatagggagcttgcttcactctagggaaaatcaaatgacagtcacggaaaatgaagaaaaagacggagagctgctggagggatgatatttaacaggaagcaaaggaagccatgcccattgtttgcaggggtagcctttctgccatgctcaggggtatggcgagctagcatctctagaactcagtgtgtctgtagccaaatgatggagggattctgtggttgctgccgttatttagaaaccatcgcatgtgagagggaggaccacttataaagattagaaacaagtgagcaaactggtgacaaatagaattcttgacaatggtcattaagttgccaaatgacttctcagtattgagacagatttgcaatgtattccaaacccaccacagggaggaaacaagaggccacggtgcttgctgactaaaaacaaagtgattgaacagcctcacatcccagcttagcttcacttggtaacaatatgcgtatcttggattctgcccaccctctttgcttacgtgatagtctcaggatttggagccgtatctgactcagtttctccaccacctacacatccaacagagactcgatagcatgggttgaataaattttgaattcaataattaacataatctcagagaagcaataaaaagttcagctctgaaaaactataggtttgaacatcttgggttccaaactgaaatctcctggtttcctaccactgcagactgaagacccagagaggtatggacaggagtggcttgtacagtctatcagtacaaataaaacacagtatatgaggtgtagtgatagcaaactcctaccaacagttgtagaatccaccagcagctgcagtagctgggaacagtcctggtactcacacagtctgtgtctcagggagagaaaaggtttgatgcatctcatacataaaaaagaattcctgagagattcatctcaaagtgtgtcttactgactgtcctattgctgtacagcaacaccatgaccaagacacgctttaaaagaaagcatttcattggggagagagttgctttcagtttaagagagtgagttcatgaccatcgtggcagggagcatggggcaggtaggcatggtgctggagaagtgcctgtgagctcacatctgatccacaagcacatggcagagagacaaagctaaatgaaatgatgtgggttttgaagaacacgccccctccaacaaggccacaccccctccctcatccttcctcactgaggaccaagtattcaagtatctgagccatggggccatcatcattcaatgcaccacaaaaggtaaaccaatcgtaaatcacaggctaagactctaacctgaaaatctgaaatccaaaatactccaaaatctggaacttttgaacacgtatgacatcaagccactcatggcaatgtccacacctcactcatgtgatggatgcagggcagaatgcaggagatgcatgaaatcgcctcaggctctatgtacaatacacacatggaatctgaattaagtttgtgttcagacttgagccttgttataaatatagttcggaatgtccccaaaggcttatgtgctaaagtgttagtgcccagcctatggcattccaggcaggtgatggaaccataaagatgccggtcactggagtcatgttcctgaaagggattatgggaccccaatgatgttaaaagaatgactttatctccttacatcccacttacgagatgacaggtcaccatgcacctttgacatgatcgttacaaccaaagtaacagggataattagcatggctagaagccatgagctttgccagttttatgttgtccatctcaagtattttgttatagtaacagaaagctgactaaaacaaaacactgccaagagaagtggccttcttctttactgtgtacctgagatgatgtggggaagcctttggaaggggttttcaggaagagtttggagaggttgacagaagcaggctagtgcaacagtgtccatcccctgagactttgaaggtggatgagcttcagtgtgacacaatggcctgcctagctgaaaaactttcaaggtagaaaagagttcaagcagtgggaaattctggaaaatctgaaatctggttagaaaagcacgtaaagatgtcaccaagggccacaggtgccagctccgttacaaagaagccaattaaagccaagcatggtggcccatgggattgtgcttgtggggttccaacactcagggtcaggagttcaaggccaacctgggctgcatgaggccctgtcagagcaaaaacaaagggccagacctttgcacaagaacaactacaacagtctacaggccacaagcttcctttcaaaggctttgcattgagaggagggtccctagggaagccctctgagaattttttgctgtgttcctctgcccaagccctgcatggctgccatagctatgattcaagctgaatcatacacagcttgtaccagcagcaaatcctggcatccttgtatattacaggctttgcagagatgaagaatgtaagttccagagtcacggaggcatcctctgagatttcaaagtaaagccaggtatagtagagtcaggatctcggcaggcagcccctgggaggtgatatcaatgtatgggaatgaagctgaagccacagtggagaccctgggaagcgaagagacgccaggaatttttaaaagtctgcccaggaaagacacatcagacaacagagcaaacccaagatcaaggttctggggctgcagctggcagggccacagagatgggacttgggacttatatcacaacgccatgtgccctgggtgctgggcacagaaccatgcaacgtaatcttacatcacaacaccatgtgccctgggtgctgggcacagacaccaggtgggtttcagtcttgctttggtctcactccaccccttgccattttcctgttcccctctttttaaatgcgaaacatgtcatttaggaccaaggagcactttattgtttttgtttgcttgctttcccaggaactcaggtgactgcgccttgagtctcagagaattctttggacttgagcttttgagcaatgctggaatagaccctggtcttggatgtagagtggatacatttgccttgtgaggtgaatacaagtctttgggaaccaagaatggaatgctttagtcaagttgtggactatagcccaaagtcccatgtgctaaagactggatccctggcctatggagctactgaggggtggaccctaagaagtaggacctagtgagagacctcaggtcactggaagtgctccctcacaagggattgtgggacctcttgctcaatctctctctggtgtcccaaccacatggtgaacagtcttcccatgagtacctgccatggcacactgctccagcatgggtcctaattgacaggacttatcaataataagctgaggtcttggaagatgcaagctaaaataaacctttcttcttttaaagttggttgtgtcaactattgtgtgacagtaacatatctcttgtgtgtgtgcgtgtgtgtgtgtgtgtgtgtgtgtgtgtgtttgtgtatgtgtgtgtgcacgtgcatgtgtacaaacagttcaaagtctaaaaataaaatctaagacaaactttgctgcagcatttaagataagggttactcaacctgaagtctgtaatgagaacagagactccatgtttaagctcctgcatgggctcagatttttaatgcattgacttttatttttattcagagaagatgaaaaatatttttatctcaaggttttggaatcaaatagcaggtggcagttaacatgagaagcttccccagagagactaataggcatatgtgtgtacagatgatgacatgcttgtccaggtaccaacaccaagaccactgcctgaagtcaactcaagagccactgtcctctgtcaatcaattcgctccagagatctctggcaatatgcctaaaatgttctgggcccaggctggatgctcaacttacaaagtattaagggttcctcttgacaggctaccactcagcttgcttcagtgactaacgccacgagagagaatgatgtgtgtatgagggcatcctatgacgtcagtccatccagtgacttatcttgtaccagctaggttagttttgataaaattaagcctggtgcctcacctcttcccatgggttatatctatttcttggaggtcttaagagatggacctaagaaatttatatgcccatcacagttggatgtgtgtaaaataaaatctgctgaaagagtggattgtaacacagagagatggctttatcaaataactacatgacagccaccagcaaaaatgtgatcactctgtctgcccctctgacagttcacttggcagcttgcccttgccatcatgacttaattctgccaggcccccggggcctccctaatggctcatttgctcagtcctctctgatgctggtgaaaatgccgagccgtcttatgatgaatgttagcgtcccagagaccacttctgtgacacttctgccaccctgggagacatggcatcttcagttcctgcctgctcaggggcccaccctgtcacttatgtcaatcttgatccttacttagtgtatggtggccaccatgcatgttctgttagaacagaacagaaaatgtacactagtcattctcaatctgtcttcttgaaatctgaatcagtctgagttgtcttagggttttgtttgtttgttgtttttctttaagaagatgggagaaaaggatgatcttaacttagaatgaatattgaacctaaaagctgaaggcaaatggctaaggagatggctcagtcaagaaaatgcagctatgagggtctaaattcaatctctagaacccacataaaataaaataaggctgaccatggtgtcttgcacttacaatggtggctctgaggagggaaaaagagtggtccccaaggctcactggccaagcagcctgatcaatggggcaagttgcaggacaggacagtgagggaccttgtctaaaggaagaggaggaaagggtgcagagagagagggaaacagagacagaggtagacacataagaaatgaccctggaggttgtcttctggactccacatgtactcacaacacataagcacatgtgagcacacacacacacacacacacaaattgaagtcaagactacaaaattcttacataaataaattctcatgaccttgggttagacaatgatgtctttcttttctaattctggatttacttataatgagacaatgctgggattcaagagagtaaagctggcagcttgcaaggcctcttatgactcattcagatcagacaatgatttatttaactatgacaccaaaatcggggtgataaaagaaaaattgataaattggactttatcagaaataaaacttctgtacttcaaatcatcatccaaaaagcaataagatgactcatggaccatgagaagatactaacgatatctgataagaggttttcattcacaatattttacaatagcaacagcaaccataaaacaagccacttttagatagcatgggggctatgaagtcttttattctgttttccagagaaagcatggatggtctaagcacatggaaagatgtgcaacctcttattagaaaaatgaaaaccaaaatatcaccatgtgaggtccctgctcaacctctcaagtcagaggcagtctgcagggccgagagcaaggacggagcagacgcgaaatggtgtggccactgagcaaacagttcagatgtctctcagaaggttgaacatgaattaccacatcagctcctaattccactcacaggcacccacccagcagacataaaagagcccatggactcgccaagattcacatgcagaaagctcatagcagcattattcctagcattgatgagtgggtagccgcaaagtaccatgtgatcaggtggtgaacgaaatgaaataccgacagaaaccacgacacactgagccttgacaacactgcagtgagcaaaggaaaccagactccagaggccacacagcacacgcttccattgatctgaaccgctgaaagcagagatctgaagagacaggaattactgataggattgtcggtagcaaccataaatctatgaaaatattctaaaacccgctgaattactcacttaacagggtggatttttatagcatctcaattgaatctcaggaaagataccaggaaaggaagagtggcctctaattcctacccctcggtgtcaggcccgcacacacatctggccccataaatgaacctcagccagcccacagtggccaacatctcctcctcaccacccctcagggtccctcctttctcccgtgttcacaaaacagacaagaaggaccccgtggtagcaaacacatccacagtcaggtattgctaggtttcctctctgcttcatgtgcaaccaacccagttcagacagatggacagacagagacagagtagtagagagacattatttcagaagacactgggtggagacacattactttttacctgggaaagaacagaatagaagaaataatccgtttgcttctgcccctcctccactttgccacatctttcactcctgaattctcctgagctaatgtaatacaatcttgaaaatttacaccataatgtgatcgagaggggctgtcaagagtcccgcatagtaaactggcagccgtgctaatcgataacctactttcaaatgaaaagagtctggcccaatccctcctctctgccctggggctgccaagcaacggagcagccgccttctggggtgaacactaattggtgctcttgagaagccaggggcaatcttatccaggtgacccattagctggaaactactacaaaaggaggcagagggggtgggggggccagggtaaagaggttaaacagcacaaaagtgatttaaaggggggaaaggcgccttaaatttgtatgtgaaagagataaagggaagaaaaattaatgcaggaaaatgtctgagggctcagagagatttacttgggacactcctcacatctctcggcccacaatgggatctttccaaggctggggtgggggaagatggagtgggctgcccctcactccactggctcccagtatagaataagagttctgtatgaccccactctggccagaggcaagcatgtgactgttgctgaggtttgcatcttccagaattttctcttgtcatttctatggtgaccacaggctcatgaacacatacctactgtgggcagaaaaattaacccagctctgcagactgtgtgggcagatgtgagcagtttaaaaagtggctacaaatctcctcttcaagtcctaggtcacatttggcaaaggtcacagtttaggaactaaagatctcagtggcagctaccacacacagaacacaaactcccccctaagtcttacagtggagactgcctggcttagccttgtcagtagctctgacagacgttatcgtccccattttacagaggtgtaggctgaagcaagggcagcatgaggaaagagcaagggtaagaagatgggttccctggacgtcaatgcccattctcccacagttggagctatggcttggctcttgaatagccgatgaataaggccagtgtgttgaagaactggtcttcggcctatggctattaggatgttgtagagccttcaggtaacacttggatgacagatgtcaacatcacacccagcttatgccttctttttaggaaaagcagcagatgagaagtgaccctgtgctgctcccctgccaaagtggcccatggcctttacactgctccaccctcaaggaagccagtcctggcctgggcctggctccagtgcagctccttcgcctccctccaaacacaaacagaaagcagcaacccccctccataccaagtctttcattttctccactgaaatcacaggacccaggatcattaaacttctggtgggagagacggggatggggactggccagggccccagaggctcaggagggcatttttcccctggtctcatttaagggtcattttgctaatcagaaacagacctaaactgccagctccattatccatcaccagggggcagagggaaacacacacccaagaaccagaaaatcaaacccaaaaggcattagatcctgcccctttgtttcatgtgaagtgggtaaataatggttccattgagacttcactcacagactcaaggatgctgggaagtcacctcactcctgagatctgctctgtgggcaagcctggttgggccattcatcagtgctcaccccgtgcaactgttacatgaaactctcccggccaaacctgcatctttctgaagtctggcgttgcacaacacattcccataaagagacttctgactaagactctttggcaacattcaccaagagataagtgttatcctaaaaggaattagggatcaataaagatagttgtgttttttaaaaaactgagggcatggccaccctcagtgtcttcgtgtaaagagctgatggcaagtcccactcgctgaagaaccagatgttaaatgttgcatggcaggttatcttcagaagtaaaccaactgtaaaaatcataggaagaattacacgaaagccagagccccctgtcctgccagcccacccggttagccacctccctccttccgaagccccagaccacagcagacactggccctcccacgtcctagaagcctttatcttgcagggtggggctcccacgcctacctgataacttgggggaagctaagacatgaggtaccaaaccacggctcttggaacgtgcaaaacttcctaactgttcaagtccaggctctctgccaagggcacggtgtccagtaacctccaggatgcagacaaaggcagacatcctacaatgggctgcagggccacatctttccagaacacctatgtctcccttccatgactatgatactcccaagttctagtgtgatcgccacagccctgacaccattcctcccccggacaaggatgctttgacaaagaatgccagtatctcacaggggagacccctgaggaacaatatgtcagagtaaaatctgagagttaaataaagtcgtcctacctcgctgtgactcccctcctctgactctgcacaaagacagtcataaagagcctttttaataaatgttaatacaagaaaggagattgtggagctcagattacagcctcttggctttgttttcatcatggctgctttcagcggctctctacgtctccccccaaattatatctaattgttttgtacttgtttctaccccttccttcctttcttcttttctcctgctgagatgaaacccttggcttcatacatgccagccaaatgccctctactgagtcacagcatctgactgctttacttcccaatcttgacagactctttaggagcttggtcccttgatgggcagctgtagggaaagccacttgctgtacccgtgtaagcagagagctctggttccactttcttcccccttccacagtccctgttctgaccgtctatgttcacgacaccagctcacctgaacaacccaccataaccatgctcacagtgcaggggtcccaacagccccccccccagaatgggcaaggctgagcacccaacatcaagatacggaaaggaggtgagtttcaactaaaagccttgtctccaacttgtgctcatgtttgaagaagctgaagtatgtaagagagatttttttcatcctttcatgaagaaaaaacatgggtctgcatttagcactgttcaacccaaaggtaaatccacagtgtgtctacgtccaaattcgaggttagcctgacctaggaacacatactacatgtcaatgccatcaccaacatcaacacagacaatgtgttttagaaaagcatccttgggaaccgaatctccactcttggattttcccatggctacttctggctgccgcctctcctgtgtgtcaccacctttgttcccttttttgctgtaatgcgctgggggctgggggctgcagttgtaaaggaatgtgaaggctgtcacccctggctcacagctctgcatttgggctaccttggtagcatgttaaagcagtggctatgctatttccaatgtcctgcttataacaaagccactactagctttgggaagtctcttccaggaatgggcaaggagccctcaaagaaactcccaattagccacagtctaggaaaacattctgtaggagcctttgcaaggaaaacatgggagctggacagtttgatgacactgtcgcttcacctgcgggcagagccctgaatatgccgtatgatggcagagctctcattactatggtttgagttgaaataccccctcaatgggctcacaatgtgaacactcagtccccagcatgtggcactatcatgaagggtatggggccttaaggagataaagcctagctgatagaaacaggtcactaggagcacactttgaaggttatccccaattctagcctatctcgatctctcatcctagtctgtcacctcgtgagaagtctctcctacaagctctcacctccatgaaatctgtgtcttcctcatgtgatggactgaaacaataagccaaaatcagtccttcctctgtttctgtccaatactgagccacaccacacaaacacagctaacatacccgggaagtgtcagacaccggagcaaggcaggtatttcaataacccatgaaactccacacgttgaggaagcttcttctcaaggaaaaggtgggcaggactcaatccggagggcaggtgggaggcttgagctctaagctggctcactagtgatgctgatcaagtgtccagagccctgaatagctactggatcaaaggtgacaccgtgtcaccagtgttggatggaggaaatgtttcttggcccccattccttttctttctctcgtctattaaaagaaaaaaattaaaacaaaccactccatttccagccctgatcatccttaaagtggtgttgggagaaaaaaatgagggagtgtccacctccctgtggggtaacctagaaaccagctgcaaaatacaaggtggtattaactgataggagcttttaaagggctcatttggttgaactccaaaaaagtcataggcacaaaatgtgctggcaaatttgaaaaagttactctgccattgaacatattgctgtcaaggacccaagagtttaacaaatcattttttggagtttacagcaaaatgtgcaatgtaattatagcaatgtattagtgactgctattcagggagtcatttaatgtgctatgctcacacagatttatttgccagatcttgtgtttacccagtgatgggggctgcctgggtgaaacccttctcactgttataggcacacacgaaacagtcatgaggcactgagggccagagtagctggtggcccagtctatcctagggcagatgcagaggaaggaggtgtctaagtcttcccagaaggtaaatgaaacatcgtcgactgaaaaacgagcatctgatggtatgcaacgccagaaacttaaaatgctgatccaaattaacatgacaatgactctgtcccaagtaagaaaggtaacaggtttgagaagaccatgatctactaagaacatgccatcctgtgttcttgagcagaatccaggacaccattctctttccttaatgcctgtgggtcaactgtcctgcctgcttcatgcccagcattgaaaggcctgaagccgactgtggtactctcctctgccctccagactccaagggagcccgaagcttctagtggaagcaaagtctccatgttcttccagactcctcaccatcacctaggatgcaatggtgtgttgccatatcaccacaggacacagacagtgcagggaaaatgacagcaatcacaagtgtggcctaaggggtctgtgtctatgcaggtgatttcttctgggtacagtgggctgggtgttcatgtttccccaaaagttatacatggaaaccaaccatccctatccctcaaatgatgacagaaaagcaaaaagattaggtcaagatgattgtgaagctgtcttagttggtgttctattgctgtgaagagacagcatgaccaagacaacgctcacaaaggaaaacatttcattggagacttgcttacagttgcagagctgctgtccatcatcatcatctagagaacacagacatggtgttggagaagtagctcagagctacatcttgatcccaaagcagcaggaggagaaagtggcactgggccttgcttgggcctttgaaaactcaaaacccactcccactgacacacttcctccaacatggccatacctactccaacaagaccacacctcctaatccttctcaagtagtgccactccccgatgacttgcctttcaagtatatgagcctatggggaccattcttattcaaaccacagcattctcacagagggaattcaggccctcacaaaagagactaaacagcaagccggtccttcccatcactgcaaaagaaataggagaaggcaaaataaaaaagaccaagaagcaaagaaatcagcagtcctactcactggaagccgcctagctccaggttccaccgtgtagcctgacataattatcctaccacgcaccacctatttctggtcagcgatgacaacttcgctctttggaagacctaggagccatttctgtaagactccagcgagcatccctttgtccctttcctctaccaagggcaaaatgatgatgagaacagatgattcagccaaaccaacaacatgtcaatgaacaactcatgatgaatctccagagacccagcccacagacacctggctctgccgtggatcagggagcctcctgcttctgcagtagctgtccctttggccgtcaggaggccatgtcaatgggccagcacgactgctccagatatccacctgcctagatacccagccatccacttcccctcacccagaaatgacttcactacccagcagcggacagtaatgatttgttttgttttgccttttatcaaaaatctttagggaattcaaatattcataaaggaattactatctaccgtgtgcacagtgctccaagcaaagcaggaagctgacaattcaccagtgacatgcatgggtgcaggtcagaaaacagactccaggggcagaaggtcaacagaaacaaactctgtggaaactaccatggagactgggaagcccatgggcccccacagggccatgcaaggctcctgagcttccatcaaactgccatctcttcccaaccaccataaagggcatgaccagaatcactagaaactacaagcaccctataaaaagataaatgatcctaaactccccacacaaagcccacacgtctgtttcttcccctgggggaggtgccccatataggaagcagaaaccccaatcaggcatattaaaaccagtcttttgtattgactttaccaccccggctacacacacagacacacacagacacacacacacacacacacacacacacacacacacacacacacacacacacacgtttataaagccatcactggccaacctgcaactgccatcggcctcctccttcagcctgcatgacagccatcctcagatgaatgcacttttaactgcatggctcactttattagctgccttgacctccaataaaagcttcagccttacaatatctgagacaggatgtccactgagccatcagctcctatgctccccacagggctcacagggcacacacacatccacatacaccacacacatatccacatacatactacatacaccatacacacacatctctacacacacacccctcacatccatagcacatatactgccaccacccaaacacatacaactcaaatacagcacccccccgcaaacacacacatacgtacattcataccacatatataccacatgacacacacacacacctcacatatgtattacatataacacacacacatctcatagacacggctatatacatatacacaacaagcacatatatgacatgtgtatgctcaatatgcatgcataggcacacatgccacatccaaacacactccccacatacagcctgtcccaaagagacctggaaactgcagacctaattgtatcaataaatttaggggcaaaggagaagggagtaattcagaatccagaagctgagggcagaagcaacaaaaggtctgagaagggtcagaagagcacgggcaggaacactgagtgagggtctgtccccggatgtcctgctgctgctgtgggcggggtgcagaaaacgccatgggaaaacacaaggggtatttacccagctcccgctatcctgggatgtcctcaattctactccaagctcccggcatgctttgagcttacaaaagccaaacaaagccctgcttttaatatcatgtcccctcggtttcgtctggatgaaaatgcagaatgttgcatttgaaataagagttagagaaacagttcccaggaaacatcctgggttataataaaggagaaaaatcaaatcagtaactgaatggactttgttgacccagcaggcagctagctgtactgtcctttccccagcctcatatgtgacaggaaccttaaaggcagggcctggaggtgcaggatgcatacatacattggcctaaacagtgaaagcatgtgtagacattcgaagatgcaaactaaagaaggggacatcaaagggtggggaaagtcctgggcaaaaccacttttcatttaattatgattcaaatgtttggagtcctcgagttcatccctgaattaccaagaaagagaaaaaaactccccacaaattattcctcaatcccaatcaatagggcagatattcttaataaaaatggtaagtgaccctttcacagtccctacggctgtacttcccttagaaaacccttaccacattgatcttttcaaatcaactatcattttgtttgtctaagtttattttgtttacaagcacagaggacatagcaaatagctctattaaaacatgggaggatcaaatacgacagctcacttttgtaaatcagaggccgtggcaggaggatcaccaggcctgctctacacagcaagtcctgggtcagtcagggcgacaagcaagaccttgggtgagggacaagttcagtggtcctcagcatgtctgaggccctgggttccatgcccagcaccgaaagaaacaggcaaaccgtatcagtccacggcaccttcaccaatggtaaccactgggcccaagtccacagtatggccacctacaccaagcagttttaggctcttggctcagctaacactccctctgagattgtgtcaagcctatatcctctgaaatgagggccagcgtggacttctaaagtctgagggcatctctctaggcttaaagagactcgtggacttgggagggacttaggaggaacactactgactctgtcctcagtctttgggagaaatttgcccaacatttggaggtcctagatttgatgccctacaccaaaagagagcggaggaggaggagaaaaaggagaaggaagaaagcaaaggaaagagagacagagagagggcatgggagatcaagaaacagagataccaaactatcctaagatcctaaagctatgccggaggccacattgtatatcggtcaccagacaacccagctcacctaactatcggggactgtacccaccttgggtacttaactattcactctaaactgagccagcaaattattttccttggacagtggtgattggtagagggtcctccaaattccagtttagactctgaataacatgttaacgcaatagcccaacagctcttggacacagctcttctcgtttttggcttttagtcacttagtgaagaggtctcccattgctgcataaagtcatcccattgcatggacaggggggaggggaaacactgactgtccctcaaaagccgccactagaaatatgtggaccgtactttttaggagtgtatagctgcccatcactgccgattaaaagaattacacacgtgctcgtatacacacacacacacacacacacacacacacacacacacacccctcaacaccctaagctgttgtgttagcctagaaaacaaattcttccattaagtaattacaagtgtcagacatcactcaaatgaaagaatcgttgaactaaaatctttattttgaagaacaggtttcagctttgctactcaaagttcatggtttcaaacaaaagaatttaaaaacagaaatgtgtgtgtaagaaccaccaaagatctgagaagcaccctccttggggagctaaaacagcttccaaaaccttgtcggtcagcaacagtactgaacggcagtcaggaatgatgaatgaaaacagcagaagctgccaccgtgacatgctaacaccctcagacaccattgtagcagacccttgctctgcccagagcctcccggtctgtgacattcggagcatgccctccctttatagtagggtttgcaagggccctgacttccttgtccactccaactcacagctgccaccagcacagaaaatgctgccaagttggggagggtatggtctctatttccagctgtcttcacagggtctgaccggaatcaatgcgacagaatcagcaaagtagaacagcaaagaaaactgtctgagaaagataaaactggattgggaagcagataagccgaattcctggtgctgcacagatctgcacacggcatgcacagtcactcaaggaaatctgtccttcattcgccggggcctgagatgccaaaagccactcttgcactgatccctggggagctcagagctgggagctctcaaggaaggggttcccagctatggcaacagttcccaatccatattcatggctcctgggctccatcaacctgaaacgttctgaggagagagacacctacagaacgatgaatacgtatgagaagctttattgacttggagatgaagagatggaaagggagatgaatggctccaccttctccattgctcctcctcttttctccaagcttggtgtcaggccatttgcaacagaagggaaggagggacggatgctggaaggaaactggctttcattgaattcaactcttcctggaaagtcattggaataatgacaccaagtgacggtacattacctcacaatcactcaactggagctaccagccggacaacagggacctatcgatacactattggacagagaactaccaagcagcttgcccctggccacaaccaagcaagcccagttttgtattaagtctgctgaccccaggtcttcatttcagtgcataagagcatcaggaatggcacccctcaaaacctccctgtggagctgcctcagatgtccccagctccccatcgccattggacacactgacattgacaacctttttccaagatgccagaaagtcttcaagccaagatttccaatggtcttcttatggccaactccatggacacttcagtagtccttgcctcttagattccttcaaagttctgagttttccatcaccctggtccccaaaactcctactgtttggttttcatgatgctgtatatcctcccacgtttttggctccctctttttctgacctgttctgtgtcttcctgatcccttgggcttcctgtccgttctgagccaaagcttacatcccatgctcagtttgtgtatgtgcctcttatacatggaggtcacaccatctgtgcattccaccacctttttcatggtgacaactctcagatccatgtctccacctccaaacccatgcaagagaccccatctggacccaccagaccaaggaatctcaagctctaaagaactcaaaccagttctgctgcacatggccatccccacccctgagagcaaaatctctatgcctgtactctccatctgatggatggagagtgaatatgccctgtacatcagcccccatccatcgtggacttctacacagcatcttgtcaggcctttcataacatttcattcatattgctatcccttcgattcagtctacaggatgtcactcacgccacagtgaggggccccctcatgggaccccaggacactgcctcaatccaccctctctcacaatacataactgatatttcaaacccctcctggacaccttccagtgactgcccactgcctacagggaaagtcctgattctttttctcacaaggatccctattccctccctaacctttccccagcctgttacatacatacatacatacatacacacacacacacacacacacacacacacacacacacacacacacacgatatctgacaatgcaccacttaagttctccagtgtacttggcaagcatagtcccctcattgccttccctctaactaggacatctttgcttcgtcataatgaatatccagctcatctttccaaagtcccttccacccccatcccctaagctccctgtacaattccagttctgctcttgggatgctacagcacagctctcacagtctgtctctagcagcaaactgtatattgctccaggcagggatttcaatattttcatattttatttatgttatgctataacactatactggtacatgaataagaatcagaaataattattggtatatgtagatcaaagaaaagacaataaataatatattatcaaattgaatcccgtagcatttttaatgcactatgactggagagactttattgcaggaattcaaggagagctcatcaccaagaaatcaatgatgataataatttgcatccaaagtacttggtagattatgatacctgttccttagttttaaaaaaaaaatgtagaagaactaaggagatggctcaatcattagaatgctggcacacaagcataaggggccaagtttgatcccaaacccacacgcgcctatgatcccaggactggagaggcagagtcagaagggtccttggggattgctggccagtgtcagtcgagaagactgataagctttggatcgagagactctgtctcaaaaattaaatagaagggaggctaaggaagtcacccaatgctgacctctggccctcaaccacacccgcatgtggacacaacacaaagcaagtaaaatggaaactactgaagtacgtttgcttgtcaagcactgagattgccggcctatgtccacaattatacagcatttagtgtttagttctctggcccatgatcttcggggtatataatgaacagtatagatcaattttatgttttcctaaatatcaatctatccagttgtccccagacttttatcaaaacacccattttcccaccacagatttaagatgacactattataataaaccaaattttcagttgtactcgggttcattcctggactttatattgagtatttttctgtttcctgtataccaattatacaccattttaattatttttaaaaaaaagctttgcaatatatcttactgcttggtagggatatcccttagctatatagtgagttcaagacaaacctgggctaaacgaagcactttttcacaaacaaaaagaataaaaattaattcaggaagtgaagagagaattcctgtgtgtcagatgcctttctactccggattgaaagggcatttttctctagaggggttctggagaaggtccaaagacaacagccagataccggctgacacatcattttgatgctgtaaaccttatgttaggaacacagatgcatccagtccttcggcacctccatcagtgcacataaagatgggctcctccaaacgggtgcccagaagagagaaagatcagctgagagctcactctacacagtgctccttgacccaatgagaccacacaacaggttacaagggagaaaggatgcccacgagaagacaagggtaaaacgattctgaaaagggataggagaccccgtatcactagctggcttgtgatctttgaggatcagagtggcagggaaggctagtgctccatgtatgtgtccctgagtgtccagctacaggcccctttcctggggtcgggatggagcctcagcagatcaacaaggtgacagtagaacagagggcatgtcttctccacgctctctatgccccaactcaacagcttctcgggaccatgacagtcttgtatattgccaccttcctggtccctaaggatgaagctgtcatctgaaagcccagaaaactttaacattctcaagcatcagaccctcacttgttattctaacagtgaccctcaagggctgtagagggaaagggacttcagatcccactattctctgtgatatgagtgtgtgtgtgtgtgtgtgtgtgtgtgtgtgtgtgtgtgtgtgtgtgtaaaaaacacaataagcacctataactccaagacaaatcacacacatctttattttgctatatgaaactgtcaatcttagcacagtgctcagcacacagagacaataactgtcagtcattcatcattgctctcaccatcatgtcattagctgatgagtggcacaatctgtgacttaacaccaaagagcaactgatatgtcctaaattttaattgacttaatcattccaaagactgccaaaccaccgacctcagccacctaaaaatcacatttccaatgcaatcatcttgtctatgaggaatggggaagaaacgattactggtcagggagttttgcaaaccagttcaatcactacaaaaactgaccatgttggttccacacttaaaagtctggcaaaatggaatgtagttaaggaagaaattgccgcttgtctgtctccactgggaatgttttttataaactctggagatgtttcagaaggttttaaatgataaatactgtgggacatttttcattactgctgttatatatcagctgttcgtttatttcaaagggctggaggatgaagaggggggctgtgaaattctgtcttccagagacagcatggctgtcacaatcatgagctcgaagcagctgtagttacctgcacaagacctacacaagatcaagacactcaaaattcaggcatcacccaggctccacccatgagcagctgttggcagtggatagctgctggacaaggaggaaatcatcctttgctttctttcaagaatgtggccctggtaggtttccaacactctggtggatggccacacacctatgtgcatacgggtagcactgactagacttgctagaggttgtcaaaaaataaaagaggacatcaatttgggattatgttggggggagagagggagtcgggagggggtaatgggaggtaaataagatcatatttcgctgtatacatgtatgaaattcttgaaaataagaaaaacatgtttgcatgtacatatgtgcaccacttacattcccttgtgcctacagaggccagaagagggttggagtccctggaactggagtttcaggcagttgtgagagaccatgagggcgctgggcactagacctccatcctctggaagagcagccagggctcaaacactgagccatctttccagcccccagtaaggaaacattttaaaaatactttcaaaatgaaaagtattctaaagatatctctttaaagatgtgttcttagagtaagggaatttgggtcagaattccttcataattagcaaatattttaaatgtaaagtctattttatctatacactgcattttatctatacactacactattttatctatacactaagcactacaatggcttgaggggggacttctgaatagagttatttttcatactccttcctcttttggaactggcaaaaatacagaaatatttatttatatctccccacgtctagacttccacaggctctggctatttagagcccacgtttggtgtttttaacccctagcacgcattcttttctttcatctctgtgactcctggccacccttctcagggcatctggctaatcttgctgatatttctggggcatagatgggctcaggacatgtgactaagaacaaaagtcagacaggaccgtacctctggaccttccttctgcctgggaggggtttttcttttattggtatggaaatgcgcagacgtgggataacctctgcccaacctggagcattcccgctttctccagggagtttcttcaggctggtgtttcgtgggctctccacagtcgattcaaaagttctgtcaccactatcagaatgatctaggttagctcaaaagaagggagagattcattccttggcccctttttctggctcagtgcctcgactgtatataaaacagggaagacactctcgccaccactcagggaatgttttatatttacacagtgaaactcgacagtggggggaaagacaagcctggcttgaagtcccaactctttcccacaccccactcttttgtttcctctgagcactttcacttaaaccacgctaaaagagaaaggatataaactggcaagcactttcttcccggggtaataaaagtctgtcagaaggctttacaacctgacaccaggaacacacatctccttgcccaggtaagttgctgtccagaagacgaattcaaagcaggattgtcactcccggggtcttggaataaccagcaacaatctgttttatgactaaatctgcctctgctctcgatcgcctctctaggaaactcaaattattacccaccaccatatttctctctccacttcctgcctctgtcaacattaccaccacttaccaggttacccagctactcccaagtctcataatggtctaccaggaagcctaatcctccagtggccgcataatggtctaccctgaaggcctgtcctctagtgaccacacactgatgtaccctgaagtcagtacaccagtggccacacaactggtctaccctgagccctgttccccagtggccacacaactggtctaccctgagccctgttccccagtggccacacaactggtctatcctaagcctgtcctctagtggtcacacaaactggtctaccccgaagcccagtcctctgtggccacacaagaatgctcagactcgggcagtaactcttgaagcaccaaagctactcttccatatgggggacaaccagatgcccctgaagaaattatccagtacttcatcacttctcctcacccactgtccccaaaagaaactgagggcaactcaatagagcttgctacctgaaaatgagcacagggagggaagtcacatgacagcacagtgatggggacgtgaactcatcaaattagaacctgaatgtgggcagcatctttcaacaaaatctcaagttctataaactgtgactctcaaggatattgttgcttagatgaatgtcaactttgcatctttctctgaagaatggaggcacttttcaaatctggtcttgtgacatccaacaatctgagtcactgtttttcatttctgtattaatgggaaagttaaaataggataaaatcgccttttatcccagcactcgggacgcagaggcaggcggatctctgtgagttcaaggccagcctggtctacaagagctagttccaggacagcctccaaagccacagggaaaccctgtcttgaaaaaaaaaaaaagagagagagaatatggactcagtaatattagtggtgcaaaaagaacccaaaccaagtccattctgaagtaacagaattcagggcatgtgtgtctgtctttgacttttgactatgtagaaggattttcatgccacccaatacagtttagcactctatttgtgcaaatagtccccaaacacagttgagtatcttaagtgaattatgaagatggtttttgctaattaccccctcaaaaccaagtctttatcttctcggactattgttctccagggagaattacatgttgggagtcacaatggcatcccttgttctactgaaacttaaccccttcagtgcctgcagggtggagctccacagattgctcataaatccagccctgagaagaagaaatgccttgtctccaacagacaggacccaccacatagggcaccagagagcatagcatttgtttgattaaaatgctgcaaagatgttacagaaattgcatctaattagaggatggcagtgcttagcaagtatgcacacccctaaagctaccattctcaaacacaatcatgggtagttaatattaaggctccatatctcacttgctagcaatgagccaaccccaaagcatccttattcctggctaaatcctgcaagctaccttgtacctaatgctatctatgtcttgatgcaactaaggcaactaactgtgtgtggtgttgaaatgtgcgctcggtcgacacctagttccatgactcccggcttcgctctcgatgctcctggatggtagagcactgaggcttggcacatccaataccgcgtctggagccctcgcctccctctaatatgaccggcttatcaacatcactttatctcagccaataaataaaatcagagcatacatacattgcactgcctcccaagtggtgtgaaatgaatttttcaggtggccgcaaaaataaaacaaaggccgagtctgtcacacgaccccacaaatcaccaagcatgcagttaagcgtcaacctttatttcttcctgtcttccctgttcacgacaagagttggtacttcttcacttccacataagaggagtgttcaaacaacagcaacacaaagagccccttaggagcatgcgacctcaagagtgctctgagaaaactttggtggccggagatttattaggattacaaatatctgacactgccacctcaagcaccggggagtctctcagctctgtgtcacacagtcaagtctctctcacgccattctaccttcctttgtaacgctcggtgcagatgggaataaatgatggactatgtgtctattagaagatgacaaggataccctgggcatggacctgctgtcatcagggccatcctcggaactgggagggaaatcgaggaatattgacgaaaattcagcaagtaagtctgtggatggggaaaggtgttaaatcggggcagtgtagcatgcaaaactgagaacggctcctcatcctgcgatttactcttggggtgtcctggaagattaatggtggagctacaaaaatatgccaagctgacaataacccagagttaattattcttgagataagttccagatttataaaaccaattctcctggtggtgattttttcacattttgaattttacagtcatctgtgggtgtctgtgtaattgaaccctggtgtagaaaacgtgtgtgtgtatatgttgtgtgtgtgtgtgtgtgtgtgtgtgtgtgtgtgtgtgtgtataagcagatgaggcaagcagatgctgttactcctaagctctgctattcgaaatcacaatatttcattgcaaaagtcacagaaaaaaaaagcaaaacgaaacagaaaatgccattgagcagcgttggcagccttcacagcaatccactgttttcttgatgtttctaaccgctgataaaaactctttcaagtggaagagtaaatattatcgaatgatagcacttggacccaactgtgcaaatacaactgcattgtgctccgctctgggggctccgggccggtcacatcacacatacggggttgctatggaagaaccaatgagcttattaaataagcccaggagctggtcaggatacatcttggctcttacagagagccacctcttaatcctcctcacgtggacacatggagtgttaagggagaaattctggcttggggaactgtgtgtctgtggtgcttggaaggtagggccaccacaaacaagccatgggaaccctcattcccagccgctgattgctgctgccccctttggcatgctgctgcaggattgcagagggaggtagcgggaacagcagggcaaacccgctgggcgcatccctctacgccgccaggccgggtgctgagctagaagccttacacccgggcaccccaaggcagcatccgagggtcggttacagctctccacaaagcacccctcagtggctcaccttgcccgggaggggtcccggcagcagcagcttgagagcctgcctcttcagctccaccaagcgggcgttgcagttctcgcaccagacgcctcggtccgaaccgggggaggagccgccgccgctgcccgaacccggggatccagtgccgaagcccggcgagccgcccagggatcccggcgagctggtaccgatgcccggagacgcggggcccggggaaccagtgaaggagctcggggacgaggtgcccgagcccggggacggggtaccggacgagccgagcgcagaacccgcgccctcgggggtgggccggctccctgtgcgagattcctcatatgccttacggtaccagctctccggagagaagggcgcggcgggcttggtgggcgagcacacttcgtttacctgcaggagagacacatggcgtcaggccctgaggggccaccgatccccgagtggcacagcctggagggctggggcagctgtcctgccggcactgctgcgaacctgcctgcccaggaagtccatccctcaagtgacctgaccttaagcgagtcgtgtcccacccacccttgccagggtgaccgcgcgcaggtccccctccattccttctggtagggtttgggaggcttgggtgtccttcggcttctgcgagaacacccagaaatccaactcccccctctttcaaacccggtacccacccccaggaagagcctaggtacacggtcctgaacaccatatccatatccaaggggtgggtgactgcgacttctgggtgtttactcattcggagcacagccctccgggtcccgcaggtaaatgaaaggggctccccgctcccgggcagcgagcccagggaaccgcagaggaattccggggaaacgctccccttcggtttaactctgccttcaagtcccggaatactgcaaaagttaagggtgcggggaaagggaggaaccgaggatctaagacattcccggagccaggcgagctgcagacccgcctccgtgcatgcacagccccgccggtggagacgccggtgcacccgagagctggggatcgtgcgcccgccgcgggttcccgggggacacccgcccggatgggtccctgggaacgcatctccgcgtagacgccgccacaacttaccccgtatttcttgcccctggtggagaccgcaagcctctctttatttccagctaccgaattcatggtggctcttccagagaaaaaggtctaaatgttcccacaaggctacatccaaaaggtctgccaacccagaaggcgtcccccctcctggtaggggttggtcctcgagtcaagatttcttaatggggggttgggaagaagaaaagcaaatggaccccagaagtgatagcaccaatttgcaggaagggttggagccgctggtggttctcaaataatgggttccctcatctctctgcctcctctagccacgcgtcctctcttcggcgctacatccagatcgctggcattttcctccgccggccagcgcgttctcctccagcggggccgagagcgaggaggacggcgaggacgcagggcggctgcagggaaggtgggcgagccctcgccgagccgagccggcggtgggaacttgcctccttccccgagctcgctaactgagttcaaagaaattctcccaaaatataaggatccagactcggggaggagcctcggcgtgtcgccgagccaatatgcgccgtcccgtttttctcctgacagttgcgcgcagggcagggagagggcggctgtgcgcggccggcgagcagcccgcggtcaggacgcgcgtgtgcgcccgggcgcagcgcggagcctaggggaccgcgaccccgccgcctcggagcccgcccggccgccgccgccgcctcaccctgcgcgatccatttacggcgcggcgctcgggcctggcatcgccaggcgcagccagggcgggggtggggtcgtaaatctggctccgggcgggaagttgctggcgaggggtcggcggccggggggctccggggctacccgcgtgcgagcctgcagctccaagccggcggagctgcgcggaaacgcggcgcccgggcctccccgccccccgggagctggtctcttccagcgaggcttgcaggtctgcctttgaaacgccgtgcaaaccgattgagtcacaaacaagtccgcaaacaggccggggccaaccccccgccctttgttctcccagacctgcctagcaaacctttccttgaatcgccctctcagccccagccggccgggggggggggtctttctgccccggacccccgcctgagcaccgggagccttcagcccccgcccgcccgctcgctcgctcgcccgctcgcccgctcaccctccggcccaagcccctgttagtgatggggaaacctcccgagacccgcacaggtgagccagggacccagcgcgcagctgccaggctggggaaactgagggattggccgcgctgcacacgcgcgggaggactgcgcgggcctggagaaggggggtgtggcgcgagctgcccgggcttccaggccgggatcagtgccctcgcccccttgtgcgtttgcctgcgagcatcgggacctgggagatctccagagcacccagctgtcgccctctgtctgactcccgcccccgcccccgcccccgcccccaccccacgtagcgccccggagctcaggaagccggtgtacgccgggctccacacgtggctgctccggggtgtcatttttcatttcccgggaggacatttcttctggtgagccggcaggtctattttgttgtgacctttaattaacaccccgcgagacgcctcctgcaggaccagccgggcgcggagatcacgtgtggtgtaatggcatcccggcaccccggaaagacctggccttgggctaggagggggcagggggacatttcgggctttcctagttgctgtcttccttctggcacatggataagcggggaggaggggggagacgataacagttggggtgctgtaaccctggggcaacgccccccatcgtgtcttcttcctactggaaccttcgatgcctccccggctcagccaccccgccccgcaccctctgcagccagtgcacccgggatatttcacagcctcctaagcgaggcgagaaggtcaaaatgaagatgttgcgagcactgtggaagttcccattccgtttctactcccaatttcaacgcgatcctatctgcagaggacctcagggggacaggtagcctccaggcagcgcgtgccggctgcagccacatctgtattctgcctgggtgccgcggaaaatatcgtcgccattagctacgcgcggcttatcagccccagagcagcatgtggccaggtgaaatggacgagcccgtgaagccccgagtgggaaaggtggggtgtcgacgggggcgggcggggggagcgccatcgccgagctgctcgattcgccctgaagaatgatgagcccagagcagagctgatgtgcatcccaaaagcccaccgcgtgtttgatggactccgagcgccctctgttggtgaaattttatatctggcgggccccctcaagagagttgatgtaaaatctacatacagtgaaatgcgtaaaatttaagtgtaaaattctgtttctgtaaacatatatgtgcagtcttgtacagtccactacacaattaggacgaaaattcttctcaataaaaaaatccctcccccttcccaggcagaccccgccccacataacaattagcaatggctgtaccgacttcccattaccacagatcagttttgactgatcttgaatttttttgtctacagaatccgtatgtcttttgtgtgtggcttaacatgggttttgtgtttcctgttactgttcgcatgggtctgtttcctattttgctatctgacattcctcccttcggcttgcctttcttgttaattgaataatgtcttcatactctctcatccctcgactgggtttctagttctaatgactctcagatgaatctttgacatagcgtgggctgttcagggttaccattgcagagttcactaaaatgtgcatttcagcagcaccaattccatttacctctgtcctttgaggtaatgatttaaatctatacgttataaaaatccacgatatgatcatttaaattatgttttaacaaatctgtcttctcatgaaactaggaaaaatatgggtttttaaaatgtatttacatggtttatgcatgtctggatctcccccccaaaaaaaaattccaattgaatttttttcttttaacctcgagaatggacttcaaaggaagcatttctttctttttaaaaaatttacttgttttcagtgtgtgtgtgtgtgtgcgcgcgcgcgcgagcgcgcagatcctctgcagattgtgagctgccatgtgggtgctgggaactgaacccagggcctctacaaaagcaaccagtgctcttaactgatggcccatctgttctgccccttctttagcatttcttgtagcaaaggacacatggcaaacaaattctctctgattctgcttatgtgtcttacttctctgtgtaaggactcgattgactggatacagcatgctctccatggcagcggcttttcttttggcctctagaatgtcttcttggccttcttcctgattaggggtgagctgctgttgtcaaggatgccatgcgtgccctttctctttctacctcaggactttgactaggaaactcctggatatgatctgtgttccttctgcccagggcttgaattcctagaacctgaaagttagttacttttctgttgctatgataaaataccactacgaaggcaactttggaaagaaatagggtcattttgacttgggttagagtacgtcagcggggaaggatgggaacaggcagggaagacaagtggcttgaaactgacaggtcacatttcattcacacaccggaagcagagaaagagagaaaatagtctggctataagccctcaaagcccaccccagtgacattcttcctccagcaaggcccacctcctaaaggctctataaccttcccaaatggctgcaccaatggaggataaagtgtttaaatacaggaacccatgaggaacaattctcattcaattgaccacaaagttgacctctaaaacttttcaccaaatttgggacattttcagccgctacttattcaaatccttgcactgtcccatactgtatctttctgtgcagtaatggggatccagtaatgtgtatgatatcatcacactctatccctagtcatgacacacgagttgactttaggtcacctcatttcagttgttctctttttttaaaaaaaaaaaaaagtatttatttattatgtgtacagtgctgggcttgcatgtatgcctgtaggccagaagagggcaccaaacctcatttcagatggtcatgagccaccatgtggttgctgggaattgaactcaggacctttggaagggcaggcagtgctcttaaccgctgagctatctctctagttgttaagttcccttattaagttcactagctctggcttctgctgtccagccatgctggtgaacatattttctgtgtgtgttcatgcacatgtatacgtgtttgtgtgtgtgtgtgtgcatattcatttaaatttgtgtgttttgtttaaattctctaacatagaatgattccattttacccctcctttgttaggatagttccgttttgtcgtttcccttacaactaataaaaacagctttgccctgatacttgttctccattgctaagatatggtcctggggtttcagcaggaagtcctaaaagctttccaagcatcttgaacttgacactgagctcagcttccctatagcaggtaaaacctctgctcagctatttcatcatctacatgtcgctttttctggacctcttgaagaccttctctgtctcaggggtcaaggatgctataacccagttaaagatcatgaagaaacgtcatgcagtctccaaggcagtcttcctgtggctggttctgctctggggttttcctgcatccttccatccactgacagacctgaacactaacaggcacaaccttaaaccctgaagagtggtttcttggcaatttagccactgagctcgacagaaccttcccttcggggcctgagtgccccagtatctgcctgctatgtgcctctttgcatttatatcctgtggtcatagaggggccagagacactggttctcacccagaggtattgatggaattgattaattactgttcctagaaattttgacctgttacaaggcaatatattctcaggagctttgaattaattcttggtgttcttgtccattttatcatcattttcattggaaagttcaattttgtatgtaagatacttgctctctaattctactaccaagggcctcttcagtgtatctcacacctctagaaatcccccctcaaaatcaaccccatcccatgctggaggtgaaacacacctgacaagtgctctacccctgagctacaccccagttgaggctgttacatagtttcaaggggttttctgtggtgtgcagcctgtggagactagctgtattttattttatattaaactgaagaatcccaatgacacaaacaaacctttgcaaaggaagatagatgaagtcgatagaatgtttcatgtttcttcacatccgaggatgttggtagtatttcttaaggatttagctcatttttaaatactcttattttgggaatgaaaagaaatcatatattgacttgtagcagccccaaaattctatgaatagtaattaattgattccattgatagctttgagcgagaagcagtgtctggtccctgtatgaccacaaaatacaaatgcaagtgttcaaaccactatctgaataagaatgaagttcataatccaccttccttgttttttaattattacatgcacataacttctttgggaaatacttcatgggcttttatatttcagagcatccaatttagcttctcctttgtttatatctcaaagatgaatggctcataaaatttatagccaaaatataggatgccatcgtgcttttgagagcctaaaagtacaagtcagaaataaaaaccccaaatcagcccctgcaactcccaattgctacacagaacacaaagtataacagattccactcctttttaatagcttccctttgaactaatttccatatcagtccgggcagcaacaagccagcggagccggcagagtgcgtgtgccagaggcggctgggtttctccttgaaagataattgaagcagcttacactgcccatgtggcatcttgatgaatatgcagacaatatttgcatatgatcgactggtgttctgggaccatatgatcatgtgtgggcggccaagcggattttaacttgtgtgtttggtcattactatagtggaagaggagagtcactatccttgagcctaaggtttccactcttagaatatcatttcaatagttaactactttatccttagaaattccttctgtgttaaattccaaatcccctcccacccccccatccctgctctggtgctggggatggaacctaggtttgcctgagctaatcaagtatcctaaccctgagatatagtcccagcccaattctaagccctggcttcagccccagattcccagattcagaagagaagggtgtcaagaaagaaggtgcgtgatcaaataccatgtggctagagtagtcctacctgttgtctgacaaaagctgtcttgtaaaagagtaaagagaggtgggacagagagagctcagcctgacaacctcaggggctgggatatgacaaccttgggctgtgccaccaaggagcgctgctttgaaaaagtatcacagcgtcccatgtgtcactatttacagtgatgaagaagaaagaagccagcctgaagtcactgtggggtatgctggtaatgtctgcacttggaaggtgaagacaggaggaccacaagatcagggtgatcttgtggctatatccttggctacataatgagcttgaggccatgtcagaaagaagcagagtgagagagggaggaacagagagagaaggatggagggagggagggagggagggagggagggagggagggggagggagggagggagggagggaggagcaaagtaaagaaacagaaaagctgcagaagttcaagatacagactaagacaaactcactgtgcggctgacagacctcctctacaacaatcctggaaatggtctcacttaaggtataggatatcagaggaagtgacattctcagtggaggagtcgtgaacaactgatgggactggtggctttgtaaagggagaagctgggccttgtaagtgtggggattaagaaatccacagaaagacttcagataagaaaccaacacccagaaggaaagaaaagggaggccccagctgagccatttccccatataccaatgggggttcagaagtttaactttagtctctgctgaggacaggtgttccttccagctggtttgaggtgagaactgatagggggtaaaaggtgggggggggaggggatgggtcacaattcagtgattagaaaacaacctaacccaaagacaggctcctaagcaagcatgtggagtgacactcagcgttgctgccactcagggaatgagaaaccaaagccacggtgagcctggcctcacattagagcgaccgtcatccaagagctagtcggtggcagcgtgggtgagagtgtggacggatgacaacactcttacagttcatcaggaattaaacggtgaggccactttggaaaacagtttggcagattgtcaagaagttagactcaaaattattatatgtctatcagttccattgagtatccaccccagtacaaaaaaagttggtctttaggtatttgcccacaaaagttgtaggcagcgttgttcatgagtagccaaagatggaaaccactgcagtgtcctcagctggtaaacagtgacatagccatacaacggaatattaatttggcaactaaaatgaatgaggaatcatatgtgctatgtcaatggtgaaccataaaattgttaagcctgtgaatggaaccacagagaagagaccacgtgctgtatacgactccataagacgaacgttcagagagggcgaacttacaaagacagaagtagcatggcattgcttgggacttgggatggaaacagagactgactgtaaaatagtcatgaaatgtcttactgggacgatggagaggttccagaacctatttatcaagattgcagcatccctcagtacatttatcaaagaaaaatgttgcagtgagtacatggatgagagtgaattttacatgtaaacatagccaaagaaactgttctactgttgtccttgttggtggggggggggagtgagggggtgcattgttgttttcaatgagatgggagaggagaaaggagaaataggaagaagggacaatttaagggctgtccgcattgcatcacatgaaagaggtgagtggaggggtctggaggactcgggatgattcccagatatttaaataagtgagagagatgaaaatggccgagggacaggtggtgtgtttcatttagcaacgtttacactccagttgcttgttcctctaaagcaagagtgtcagagttgaccggtgcggccaggagcttcagagtgtccagccccagtcccatgatgataggagcctgaaccccaattctaggaagggtgtcaagacactgtctgacttctgttaagaatattagagtccttttaaaaaaaaactgagaatgtgtgattaattaaaagttgtgatttttataaggaattgcagagtaagctcattgtagtcaggaggcaggggtggggttgggggcagctgtttccagcttggccacatgagtctcagcagatgcaagagtaggagatcaggctgtggaaatgagaaccaggagagccagccaccgggtgctggacagagaggcacgtgcaagcaggcgggagacggctcccaaggacatgagaaaggagggcatgcaaactagcaggggatagtctccagggccatgagcagggaggagggagccacctgagaaccagctaaggacctagagggatatgtggggagtattggagcccaggaattgctccaagtaaggctccagaccaaagccagtgtttctaaatagtgttattattgctcataccctgtattgtgtgctccctgagccagaaacaacacaaggggcttgggtacccatcactacagcaaatgcacctattgtcacacaccacttatctcagagtctgctgtcacatctcaatctgccatgacatgtccgccaccaccaccaagtcctctctattcaaactctgcattggaaaatcaacagtcctgatcaacctgtgaattaaaactgtgtgtgtagggatggatggatggatggatggatggatggatggatggatggatggatggggaaagggagggaggaagggacagatggatagaaacagtctgtgattgctatatgcatgcatggatgaatgagagacatcccgttggaaaaaagaagagagaataactggatgttcctgagtgggggaacactggcaattcttacaagtttctttcttttcacacttaggcatttgactgttcatgtgatgggtgtgagagtgttgtgagtgtgtgtgtatgtgtggttttgtgtgcatgcatgcacaaaacaatgtgtgtgttggcccatcaagtagtttctttgagaatgccaagggagatcaaattctaatcctttttgttacttttccaacattaaaaagttcagttgggcagtggtggcacacacctttaatcccagcacttgagaggcagaggctggtggatctctgtgagttcaaggccagagtgatctacagagtgagtgccaggacaggctccaaagctacacagagaaaccctgtctcaaaaagcaaacaaacaaacaaacaaaaaaagttcaaaggaagccaggcatagtggggcctgcctttaatcctagctcttgggaggcagacaaatctcttcaaattcaaggccagcctggtctacatagccagcttcaggtcatccaagattagatagattagttagattctgtctggagaaaacaatcacaggatttaaatgtaaaatttcattttaaaataatagcatagataagtgtcaggaaattcaggaattatggtttctacagcaacatcatatgaccactgaactactattgagtaaatgaaaataagcatttatattacccttgacattcagccatatgctaaacaatcactttattggtttctagttccttgcagccacctgtgagggaggaaatattctcattcccacattgaggatgaagaaacctagtcccaggagaaccatggaccttccgtgtgcttgccaggcaaccaaatctccaggaaaccacaaacagcaaggtgagatgtcacggaggcattgctaaatgtctcctactgagcttaagaacagctgaagagggcctgggaggaaatccctgtggcccccactcagtggccctccaagttcactgcccgcccagaacaatgaacacaaactgagaagaaacagaagaaaaggaagcagaagagagaggaagaggagggggtgggaagattagagtgaggatggagaaagggagaagaggacagcgcccccagtgttcagagggaggagtagcagtaaatgccagggtcatgccgagtatggagaaagggagaagaggacagcgcccccagtgttcagaggaaggagtagcagtaaatgccagggtcatgccgcagaggggccacgcctggtgtcctgggtaccttgccatagtctcactttcaggcagctacaggacttccctggaagctagtgagactcactttgagatgaatgcaggtgcatggacccaaagcttggtcagagcatccaagccacggttctaacacgggcaatgcaggtgcatggacccaaagcttggtcagagcatccaagccacggttctaacacgggcaatgcaggtgcatggactcaaagcatggtcagagcatccaagtcacagttctaacacgggcctcaggcagaatgaagccggcagccagcactagctctgggcttagttggcacttctgtcttctccttgtttttctttttctttctgtgatgggggaggggtccctcattgtgttgaaagccttggctcgagcaatcctcctgcctcaaccttctaagcagctgggatcataggtgccccagcgcctaattttagttgccatcttttcaaatcatctttaagaagaaataaacacagtggggggagaagcagagacaagaaagctgagaggtgggaccaccaccccctcaatgtgaatttaagtgtgaaaacagagaatgccaaaggatgagaaagccataagcaggaaggtgggccagagtgccacacttcccacatcaaagagctggttttgaactctccatcttggagcagatatttagagagtggttctcccaaaagagaaacaagaaataatagggttggaccaccaacaaggctcagcaggtaaaggcactttgtcaccaagcatgacaccctgaatttgatcccaaggcccataaagtaagaaagaactgactactacaagttgtcctctgacttctataccagtgcagaggcatgagtgccatgtgactgcaatgcccctgcctctactctctcctgggtagttaacatagttaactcagctattattaaacacaaaaagcttaataatgcacccaatgtcacaagaaagcaaggtgttctatggtaactggtgttaattgtcaagttgacagaatttagactcacctgggagaagggtctatagggggagatttcccgagggagactgtctcgagtgcgttagttgtgcagtgagaagaccagcccactgtgggcggcagcagtctacagccagagtcctggactgctgagcatgcactcactgctgtgatggcaggcaacttgagctgtgagccgaaataaatccttccttctggccagggtatttttatcacagcaacagaaaaataactgagacagactcaaattccagatctcctctctctctctctctctctctctctctctctctctctctctctctctctcacacacacacacacacacacacacacacacacacacacacacacaaacacacacaccccttctctctgcctgcctaccctttgtgctgcacagaccccaggcaggctttcttgtagtcactcctgggaagagcaatcgtggagtatctgtcgttctgtgaccgacacataacatactatcttcttgcttcaaccatgttgaccgatcattttcagatagaatttgttgggccagatgaggagccagagaaataaggaagtgaggatttcccccaaatccagggccgagccagatggctgactgtcctgtgggaagttgagttagtgcatcaggccatgtgctgtgctgcttccagggtgttcttccacgccctctggcacccccacagctccccagctctactgccccccccccccccctgaggctcaggtgtcgatgaactggtgagcctctgatctctactgcccacatggaaagggatttggggtgcatcctccctcctccagaggaagggaaacaaaacagcgagaggggaaagctatggagaacacacgagtagcccagcgcactctagcacatgccaaggcatgcctggagccataggaactggaaggggcaggaaggctcctccccggactccagaagaatcatggcgctgctgacaccccaggcttggatttctcgagccagactgtgagaaggaaggtttttcactcttaaggcatctcttctggaagctgtgggatgccattccatcacctcacaatataaggcttgccttggccagctcctcgtctccacatctattataccctgtccccttctctgtcacttgggtgtgggttactgtttggctcttttctcccctgtctcttgtcatctccctttcagctctcctttccagtccagtcacaccaggggacctctggaccccatgccaccatcaccctggggcctcctttatgaaagctggactcctactttgtcctgcaccatgtgacagccagaactgctcatctggagtaaaagccagaaaaaaataagcaaacagctccacatcgtgtcattactgagtcacagacacttcccccgacatcttctctctcgcccaggtcatcatctcctgatacccagtaatttcagtcattttctacccgcatttctgttcgtctccggagaagtctcatttctctaatgcaggaaggtcacttggtcttttctgagcctgggtggtacagaggaccttgtacttggagatgatggggtggtgggggtgggtaggactaccgcagctcatttaccacccaattccagcagcagggagtaaatggaagaaacagcctggaagaaagggatctaattacttccttcccccacagcctgggtcattcctagtcttcccagggcagggttcctgtcactgagccagcaaagagcctagtgagtaagaataagatgccctaggctccggcaggatatgtacaagttcaaggatagcctgggcatcctagtgacaccctgactcaaaattaaaaggtaaaaagaggtggggggaggaatatagctcggtaacaaaatgcttgcctaccatgtgtaaggcccgtgatttattccccggcacgacaaacagccagacgcaacaacagaagcctgggacaacagcatcagagcaagggtccttgcaccgagatcaacaacgtgtttgtcaggcccccccgaaaccacgcagggctctgcaacactgtgcaaactgccctctacagcagtgtgagccctgcaacccccccccactgccctgtccgcccccccatcactgccctgtgcgccggtgcacagaagtccgttcagtgtcctttaaattttctttacagggccgggcgttggtggcacatgcctttaatcccagcactcgggaggcagaggcaggcggatctctgtgagttcgaatccagcctggtctccagagtgagtgccaggataggctccaaaactacgcagagaaaccctgtctcgaaaaaccaaaaaaaaaaaaaaaaaaaaaaaaaaaaaaaaaaaaaaaaatctttacaaaggaagtatgtatatgacaatttaaaaatcaaacaatagcaaaggctcttttctggctgtgggccctgtgcccagcctctcctttgggcgactgtttggcactttgggagattcttttctgagctggatgtgcttagccagcagtttcgtgatttaccgtttgagaatcggctcttgactccgtgtgatgaagcgtgaaggcttagttagcatctatctgccacactccttactccctcctcatggccatgacagttataaaaataagaatgggttcatgtttactgggctgtcgatggtggggccagcattgggtaccagatgctgtattctttgccaggtcacccctccatccctgacaattgttcctcactggactcccaggacccctcttccagcttctcctgttgcccatcactctttctttgcaacctctattactgactgcccttcttcctgcctgtgacaggaaggacactagggcttggcttgtcagccacttttccatctgttctccagttcttggtggctatatctatgtcatggtttcaagtatctgctggtggcccccaggttcctatctgcaaactctgagtccccacacatcatgtccaactttctacttggtatctgtacctacttgctaaataacctaccacatctcccacccagctcctgaggttcaaccttgaaagctacccctgcagtctttgcaaccccacccacggtgcttctgtctttccacttacagttccaatgtcagacagaggtcatctttggcttctttttctctccttctccacatctagcccataaagaaaccctccggttctcccctgagagctttcctccatctgagcatttcccagctgccatgggaaatggaggtggatctctacagctccatctctctcacgcagtccaggtcacattcacaggccaaccaaacttcttggttgcccaggcaactgactcttatgttcacgtgagcattctccctcagcctttccaagcagctaagactctgggtgtgttgcaacatgcattttcctctatatccaactccgggtttttattatttagagcaataaagaactcctttttacatcacatattgtctctcactttcagaatctacatctaaaagggcatgaaagtagaaggggaacttttggaaagaggggtatcaacagcagaggagggaagacaggttggtaataggggctgaaaatgactgaagaacattacgtatgtgtggacatgtcataataaacctatcagctcatacaactaatacacgttaacttaaaaatacagtacaatatggccaaggaagtggctcagtctatcgtacttgccaggaaaatatgagggcacaggttggatccccaaaacccacattaaaataaaaaaagccagacgtggtcgcacacacttagatcccagtgctgggaagcagagatggacagattccttgggcttggtgagcctctagcctagcctcttcagtgagttccagtgagagaccctgcctcagaaaacaaggtgaaggggctggagagatagctcaatagttaagaacacctggtgttcttccagaggacctgagttcagttcccagcacccacgtctccagcgggtggggggggggtctggattcttcttctggcctatgtgtgtgtcacctgcagacatacaggaagaacacaatgcgaacaactttttctgaccaaagtgcagccaaatccacatttaagatgttaccactaacaggtgggtttcaactgcttgaaactggagtcttttgagcacaccacaacatggatgaaccctcaccacttcatcctaaatgagagaatgcagacacaaaggccacacattctgtgattccatttatagaaaatgtccagagcagcaaacccatagagagacagacagcagacacgtggctgtcccgggttgggggtggggtaggggtgcagcagagccacaactgagttttgagcttctctaagggaagatggaagtagtaaaaaggtgtataggagtgacagctccccaacttcaaatatactaaaagccactgagctctacagtgtgaaaggctgaatcctgtaacatgggaaagcattttaatgggtcagtattaaaagtttccttgtgtactgtcatgtgttactgtcattccctcataactctgacctccagttaagatctaccacatctgtggcctcatcttctgaaggcagatgtttctttcccaatcccgccgccagtcccaaataaccgactcagaggctaaataggaattagaaatgctgggccaatagctcaggcttgttactggctaacgcttacacttaaattaacccataatccttacctatgcttagccacatggcttggtaccttttctcagtacaacattctcatcttccttctctgtgtttgcctgaaactctctgactccacccttcctcttcccagaattctcccagtctggctctcttgctcaatctctttctgcccggctattggccaatcggctttttattagccaatgagaataacacacattcatagtgtacaaagagattgttccacagcaaccttcaggtactttgaagcaaagtaagtacaaagaatgacactgcttgtttgggcaaatatgaagagatcggtcagacatggcaaggtgcaaagaagaatcaagaattaagaaagttgacaatcaaagtggcacaggtctttaatcccaataccaggcaagcagagataggcggacctctgtgagtgtgagcccagcacaatctacaaagcaagttccaggccagccagagctgtcacaaacaaaacaaaaacaaaaaggaactaaggaagtaaacatcagatcaagaaggagagccccatgaggtgggatgcccctctgtatggtgtaaatatatcttaataccattgattaataaaagaagctgatctggccaatggccaggcagaatagaaccaggcgggaaatccaaacagagactgagagaaggaaggcagagtcagggagctgccgtgtacctaccgaaggggtaagatgccagaacattacagctaagccactagtctcatagtaaaatatagaataataaaaatgggttgatttaattgtgagagttagttagtaatatgcctgagccattggccaacaattatacttaatattaagcctctgagtgtttattcaggaactggtggccagaagagaaagctccatttacaaccccaggcttctgtgaagttccttagggctggggtaaggaggtggcggttggtttccctcctcttaagaggcgtgagaactactgaagatctctgttaatttctgctcaacacttgtgaggcatgtatctctctccactctggggcatttgtgtggaaaaccaactctgcctttggttatggggtggggaacagcatcaggcctaagctccttggggatggtccaagatgtgcttagctcttcaaacaacaatacagtcaaagaacactgagccaatgctagaagaagaaacattatcatcatgtgtatctctacaaagaaaaatcaaatagttgatttcagccacccatatttatatatatatatatatatatatatatatatatatatatatgcgttttgagatagcatcttactatataccctaggctggcttcagacttgggaatccttcaacctctgcctccccagttctaggattacaggtatgtgaaaccacacctagctaaacaatggttgttccttgtgtgcaagcatgttttgtttttctttgttttttgtttttgtttggtgtgtgtgtgtgtgtgcgtgcgtgcgtgcgtgcttgcgtgcgtgcgtgtgtgtgtgtgtgtgtgtgtgtgtgtgtgtgtgtgtgtgtgtgttgggaggagtgatgcttgaaataaaacccaaggctcttgtatgctaggcaagtgctcttccactaaggtgcaccccagtcatgatgataatgtgagggaagaatgtggccaacccaaagtaacagaagcaagagttggacagtgatggcctatgacccatgtctcagactgctgtaactgaaacagtgtctactgttgagtcacatagaaactgtttgcaggatgagcttctcttacctgtggtaacaaagactacacttaggctcataaagtctaaaagtacaaagactgtgcaaaatacagcggtttctctattgtattacttattagaacctcataaaaagataatgagacttcttgaaaatatgctaaaaatatgtcttagctgataaaataagcagtttttcgaaactaaaggaaaatataggaggtggagagatggctctatggttgagagcacttgctgctcttccaggggacacgggtttgattcagttagctcagagccacctgaaactccagttttgtgggtccaacaccattttctggcactgaatgcaggtggtacacacataaacagcacacatacacataaaataaataagtacatctttaagaaaaatgtaattaacaagattagttctggattatagcttccctaaacattttggaagcagaactctatgcttcacaagctcatgtttgatctggattaccatcattcctaccaacactgccctctctatgccttttaagacaagcacaatgtttgggaggggaggggcctagctgaatgacaggtgggtgggcggagccaaatcctgctccctcaacgcatgacactcaggccctggtcatcaaactccatcccagttaggaagttagctcaaatggcttcttatctcacaagcgggcaggtgtccccacgggtactgtggagatgacagtggctgctagtcatgctcattcagtcttgggtacaccagagacacacccaaaaccagatgcttgagacacaatgaaacaaggacgagcaaaaatgaaccaggcaaaagcaagcaaggaaaaggctgacttctggttagatctggtccaaatgttccatataatttaattcaggattcctgagatgttgaaaattccgccagtatccctgtaaatgagagtggtggagtgaagtcccgcaagcacgaaggacatacaaggctggggcgcagctcagcgggagatcactagtcagcatgtgggaggctccaaatcccacccacagcatggcaacaacaagcgcacgcaaaaaactacatggacactggcacgggtaagacacctgtgtatttatgggctgaacatacagaatctgttgccaacatttttattgcaataaagaaataagctccccagcaggtgtggtggcgcatgcctttaatcccaccggctcaaaagatagacacaggcatatctacacaagttcaaggccagcctagtctacaaaatgagttccaggacagccaaggctgttacccagagaaatcctgtctcaaaaagagagggaggtagagggagggagggagggaggcagagggagggagggagaggagggagggagggagggaaaggaaggtaggaaggtaggaaggtaggaaggaaggaaggaaggaaggaaggaaggaaggaaggaaggaaggaaggaaagaagctcccaaatggggtcagctaaccttgaaggtcacacaaatttgtatttgttatcattattaaaatcagcagaagcaagatattttactgaaatatgactatgtcctggtaaaaggttcacactttcccttatgcttattaatcatgaatacttattataataaattttaaagctacccatgatatttttgctgccagtcattcttacaatgtaatagccataggcatgagttggactctgcctacatgtctttgccctgagcagtaggtgcctgaggcatcttgcagagttctcattggttgctaaaggcttagaaggttgtatccgggtcctcactgctttccagagggtactgcaggggtgagcttcaaagaccttcaagtatcctcacttcacctcacatagcctattcttgcccccctcccctatatttactgttcagaaagtagatgcagctaggggtagagcacatgcttgtcatgcatgaggcccaggttcaatccctaccagttctcaaatcaagcattactgagagttgggtgtggtggcacgtgcctttgatcccagcactctggaggcagaggcaggcagatctctgtgagttcaagaccagcctgatccacagagcaagttccaggacagccaaggctacacagaggctaaccctgtctcaaaagacaaaaacaagaaacaacagtattactggtgccttcctaaaagttgccctgcagtttcaatcccagacgtgtaccacgggccatcctaatttccccttgtctttttctctcgttgctttggggtctttcagatgccagtgtaatggaagtatgaaggagacatgacagtcagggcaggaccccctcacagctagacttatttaaatgttggtgattctcaggtaccacggctgcagctttggtttgggtagctgtgtcctccctgcctggtgatcatcacttggagcatctttataactaagtgaagggttggctgcaactcagtcgtataccacatgcttagcatgcatggaacacggggctccatcaccaacatggagggaaaaccagccagggtgttgtgctttaatttctctatcacctaccatataagtcagacatcgtgattgtctttgcaagaactgcccggccctgactatctgtaggagtgtctcaatatcagtggaaaaaaataaagaagagaatgttctttgcagggcttaaaggctttaatattgatatttctgaatgtcatagacaatctttgctgcctttgtaagtattagcctcaagaagaaaggtaggggaaaagccacccttgcactaggcagaacaccaacaacagctaagagccagggtttgcttatacagctcttccaggcatttagttgataaacacttctacaagaccagctcttcgctacttcctcatctccatgtatatagttcaagacaaagaatggttttagccagatactcaaggtgactgaaagcctcgggaaaatataaataaaggtttttgaatttatggtacaaaatagaaacaagaagcacaggcgctttccccttgccagggaggatttatgactttgaactctgcagctgtctgaagaagcctcggccagcttcctaaggcgctgtgcccccacagctgctgactcggcctaaagccacccgccactactatttaactcagaatttctggaagatggaaaacctcagtgttccttaaaggggactgggtaaataaaaaaaaaaaaaaaaaaaaatgctgcaaccatgccacagactactatgagggcagctcttcgggaagttccactggcccttcacagcccagttcacatgtcagctcccttggcttatgtgcctgttctggtctgaataccgaaagtgccccccacctcccacctccacaccaagctcacgtttgcacattttgtttccagctagtggtactgctttgggaggctgcagaacctttaagtggcatctctggtaggtacagcagatcactaaaggggtgtctagccccctactcaagatgcagatgctacataaagggcattagcatgcatttcagcttcccctacctgctctgtcctgcctttacaccacgatggatgctatgatctgaaaccatgtgcctaaacaggtcttcctcccttgtttctgtcagatatttgtccctgcgatgtttagagcaactagcacactacctcatggcactttgccattgctctggccatagctatggtgttggcatattggtacttctctctccctcactagacagcaggcacggggagggagggaaacacggtggattagtccctatcccaatccacagtttggtgcaccatgttcaggtaaggagcctaccaggggacaaataaatgcaggagattacttagagattggaggaggcacaccggtcacagtttgcaagggactgaggtggagaaaaatgaggtcatctttgtaggtccccaactgcacttcacaactcctgaacatgctctggtgtctccaaagaactgcttcctaagtggacagccactctggaagactcagaaacactttcctcccctattgcttgcatgaaccattggacttgatgagttgatagatcaaatctctctttcaccagtttgaagaaataaaaacagctcttttcacaggacaagcagacaggatggttcaagcactgccaattttcatgagggagatgtccccaagcctgccatgaataatggcacgaagcgacaactggtcaaccactcagctgtgggtggtgatttccacagggaaaggctcagggacaacctaggaagacagcttacagcagaactcacatgcacagaagcataaaggacttggggcagagtccaaatggtggcataaaaaaagtgctctgtttacacactgctcccacctccatggccaataaaaactaaaattcaacagtgcaaaactcaactcacttctggaatgacagtaaaacaccgtgaatgatatcaccgtatacctatggttgtcctgccaacagtgacaaacagcacacttggaccctggaatcaggtaggactatctgagttgggatctgcatttcatcacctcctagtcccaagcccttagtcttgtgggtgtcagcattttcagctgtaagctggggataacagtgactaattataagggtttgtggggattaaatgagataacatgaataagaagcccagtatgctgtttgacacataataaatacttaatgactgctagatattattgctatcactgtttccaacgtttcctggaaaactatcttcctgtctgaacacatcaatcttcattttctgcaaacagctctcaatgaaggactgacatggtcctcctcctgtttgttttcccaggcaacaaggacttcttcagtgttctcacttcccatagtgctgagcacagtcgcctgtgtctttctcacctggcccaatatccctttcttagggagtgtgatccctcactgcttatgtgtatcatataagaacaaagtcaaaattttatattcaaattctaattgtagaagttaatggaggctttactccaggttagacaacgggccaggcagtgagggtgggagaaaggggcttatagtttgaaagagaagtcacatgatacaagtagatatgttaccagacacaccagctataaatagaaataggcataagcctctggcagtggtggcatacggctttaatccccagcactcaggaggcaaaggcaggtggagctctgtgagttagaggccagcctggtctacaaagctgagttctaggatagccagcctgttacacaaagaaaccctatcttggaaaaaacaaaaggtgtaagtataaaaaggaatgccatcctgtgtggatgcccagagtctgggccaccacctgaggccatgttggtgtccaagggctacactgtcgctggtgccattagcaatctgagtggcctgcacagccacacagggccatggtgacttccaggccaagcctcaacagagggctgtgtctgggtccatggtcctatcacagctggggtctgtgttgatgttcatgatctgtattaccaccagaggcccatgggagagctctggagaacgggtcctgcccctctctggctgcctcagctggagatctgtccccacctaggagaactggcctaagtggcatgggcacaggagagctatcccctgactccatggccactgtaacaggagagctggtcccacccttcaccatgcgtgcaggagtgctggccccaatggtgtgggcatgagagagacggtcctcacccttgcctagggcatgtggtcccaatggaggccagaactgaccaactcagctaccactcaggccaacatccaggactttgagttggcccaccccaacatctaccctatctatgacttgctggagtgtgtgaagggactgatgatgtgagaaccacaaagatatatataaatatgcacgccagggagaaacagacccacagacctaggagcaagggagctggggagcaaccacacaccgcttcactccatttgactccgtcttcacaacccaagagagcacacaacctctacctcctaccttttaagagagcatatcctcagacaagaagcaaagccttaaggctggtactcaaagctattggcagaatgaattcccacaacagactggtcctgtggaaccatagccacgggatctccatgactctgggcaacagcaggatatctgagaggagtttcggtaagagtccagaattgatggtataccagattccagaggccttgaaccagaccaacaactcactgcaatcaacatttgcaaggaaagctgcttggacaaaagggtctactgcatgacacacggaagctcccaaggccactacaatgaaagaatacatgatggaaagctgggaaagataaaggagcaaatgttttttttttttccttggggggggtagactacgaaggtggcgggtagacatggaagaactaggaaatgagtgggattggggaacatgatgtgaaattccaaaaaaaataattaaaacatgttttaaaaacctgccctctaggaaagaccaagaggtcgtcgtcttcttcttcttcttcttcttcttcttcttcttcttcttcttcttcttcttcttcttctttcttcttcttcttcttcttcttcttcttcttcttcttcaattgcttcattcgggtatttttgtcacaatgatgaaaagccaatcaacatgatttgctttgggcagcatccgtactaacatgcatggcacacacatatctgcctgggaatatttctaaaagcagatgaataatggattgaacatggtagagcaaagaggaagacaggatagtcatggcaattttcaaggcaggagatgagacctggaatcaaatatataatatcaaaatattttgcattatagatgttgcataattaaaaaatatgaaatatcagaatacataagtactagtcaattatttagcttatttagggaagaatcattccaaattataaactcttggtgtactgtatcttgtcgggttatcctaagtccttgttttcttacatccccatggagtttgaaacctgttttatcaattttcaagtttgcaatcaaatgcaaacacttggcttccacacattaagaatacagaagtgctgtgacagaaatagccatggaactgttaattcaaacactgcgattcacagcacagtgagtaaggaggttaccaagagtggctttagtagcatatgaccaaatgggaatttataagggccatcacatcagtgctgtcaatgcacacagacaatatcagcatataactgtcaaactaagaagcatattttccaaaagaaatcaagaaacttttttaaaatttttttattttaaattaaaattgggtgtgttagctaacaggccagcctggtctacatagagagttccaggtcatccagaggtacacagtgaggccttgtctcaaacaaacaaaaccaaatgttgagactgggaagttacttttacttgaagaattccattgggggtgataagctcttcttaaaactatcaatgaagcccctaataaaatgcctatgccagctgccatgcccaacctgtggctcgatagctacaaacgcacttgtagatcacaataccatgacttgatgtcaaaaggcatcatgggattcctgtttgggcgtggtcagcgccacaggtacctagtaagatctctcactataaaaaggttcaccacctctgttacggaaagcataaggtgacagatggagactctgtgttgattagctcaagcttgccacacccggggctggaaagggacaaagaaatggttcagacacactgagactcctgaaagaaaatattcataaatagagttgacttagtaaaaaaaaactagaataaaaataaaactgactttgagttgatcaaaacccaagatataaagttggtctacataaatgtagggaatagctggtaccttaataccacaaaagtacaactaaacaattcccaaaatgcagaaaattcttctggatcaaagacgaggagaaaaacagtacaagacaggagagggatgtgtctggagtgaagacacacaaatgcaatggcagacctcgtttgaacccgattggaataaagcaacagaggagccacttgggaagacggtggtgggccctggacaatgtgtatcggggcactggagaattctcctgggtctgacagattctagtctactagggaaagggaaggagctccttatgtagccaagacatatctaagcttttacagacaaaatgatgtaatgtctagaatttgtttcaaaatcacctgcaaggtgaggctgaaggtgaagagagacaagatgaagggcacttagccacagattaactgatggggacatttgggccctgttacttatccttttgggatggaagcttagcaaaaagcctggttttcatcacctaaactggtgatcactgccctacaaaggtaattccatagtaacttaagcgtgtttgtactccacccatagccgcccctgccacccctccataccggtacatcagggaagcatccatttgtccagaaaagaaacttgagccagctagtcactgtccagtgtgtgttcagtctagctctttttactctggtaggagagcaccatccctccacaggtccatgcttacagaacctagagcaagaatttgccttcttttacaagtatcttgttttaactaagtccctaggagctgtgggctgttaaaagcttggttcctggctcggcactgctgagggatgatggagcctttgggaagcagaagccagtgcaaggacttcagggcagtggggtcttgcctttgtaggattgtgggatggacccaaaacatgttccggctgtggcgtacctatgcaccactggccccagagcaatgaatcccacgcctttgatcccaactctcgagaggtagacagccctttcagcctaggcagaggtaagagacagtggcctgctgctgctgctgcgcttctctgatcttccagctcgcaccccagtatctgtctctgcgttcttattatttgtgttacaccccgccaacaaacataagaatagaacactaaaaataactataaattatcctgtcagatatctcatttaaaactaaagtgtatacgattttagaaaatgttttattatgctgaattggtagacaacagtgcagttggatccccacatcacatcagcttcccaatggccaccaactcaaggacgaccctgtcttcattttaataatgacacccttttgttttgaaacaaatataagacatcatttgattctgcccataatgttttactaggcatattttaaatatacctagtaaacacattttaaatattactataaccagggctggagcaatggctcagaggttcagagcactggttgttcttctagaggtcctaagttcaattcccagcaataacatggtggctcacaaccatctctaatgagatctggtgccctcttctggtatccaagcatacatgcaagcagcatcctgtatacataagaaataaataaacctctaaaaaaaataccataaccactgtaatcagttctttttctcactgactacatacttgacaaaaagtaatttaaaggaggtataatttactctgactcattgtttgcagtgacacagtccatcatggctgggaagacatggctccaggcctctccacattagcccacccaaactacttacttgactttccccaaaccttagttgctctgccaaatactgcagtcatcctttatctctcttttctctgttaagatccaatgcatcaggaaatccatttcattttccttccaagtgaacccaaatctgagcacttctcatcacccccaccaatattgccacaccatcctgcccgtgttgaagattggctcagtagtatccagtggtttctcttcacatatcgcacgtacaaagttctctccctggcgacccaaccctttgtaggttcatctgcccatcttagccttttatttccctctgtacccggtggccagggtggcctctatgctgctccttcaagctcctgatgtcatctccacagggaatgttctttcccaatgcacctgaaggtcgttgctcaactccttagataggatttctgatctcattctagctataacaacacctttccactctcttgccgttcatcttgctttttttttttctccatataatttgtcctcctatgacattgatttacatattatctgtaagggcaactattctggttttccagaatagttgttaacacaaagttaacaactttgtcatttgtcataagttaacaacacttatcattaaataagtgttatgaattaataaatgaatgaagtgaaaaatgacacaaatgcctttttcacaaagttccaagttcatgaaatttaggaaagcaaccttattcgttcccagaaatactatatacccgtacccaacctcatttaattgaaagctatcaaaaatgttcccattcgtttagcagctttgcactgagcaacctgtggtgactgagatctcttatagagtcccctgtaaagacagttcctaatgctcaaagtgaccttcccgggaacagggcctacatctggaacagctgggctccaaaggcagatcgattctttaccctaagccacactataaagctcttttagccttagcctcaagccatgtcattctggaacatttccttctcacccagaattggcatcaggattgccaatgtgagcacaggaaacacttgtggctcatctgtcacttcctttgtgaagccctttgtgccacaggcaaagttggctgctggctgctccaaccccaaagccctttgttaacattgttgaacaactaactactgcttggtgtatttgtccttctgcctctccctaagtctacaaactcacaaagacaaggcttgtctgcccctggagcctaacacagcatctgccatgtcgtgggaattcagcggatgttcaatgagtgagcaaatgaattccacgaggagactttccacgatgcgagctgacgatggagcggatggccagctggcccctcgcttcgcttcctatttgcaggcacacttctgaacttactatttccttgctgcgttttttgtggcatttctgtgccacgggggctcatttccactccttctggtagtgactgaaagaaaatgtctctctcgaattcagagtctgctgaaaatattatgtatgcctcgtgggatcctatctccccgtgatcagagaggccctggtctgaggaaacagtctgtgaggtggaaattcagtgccctgcagcaatccaccttgatgcttcagaacaatgccatgggccgagaaagagctccagcaatggcagagtgaagctttaaaggtggggaggcctaggtatggtgtgcacacttaccataccatctacactctcagaaggctgaggcgagagaatcctaagctccaggctagcctgggctacacaaggagaccctgtcccaaaggaaaaagaaaaagtacattttaggtatatatgtattaacatggaaagactgtgtattaattcctagcagattacgtaaaaacactgtggtttgaggctgcagtaaacagtgtgtttatcatttctcttccacacaaagactggcttcttaccagagtattccttcctcagttgagtgtggtcggttggtggccatatcctccgctgaggtccatcgtctgtgatggatgctgaggagtaaagctgtcctcggcaggtgcacaggacatggtagcagcagtctgcacagacagctccactcagaggatggctcccacactcttgctccctgttactttgtcctccaaagccctgtggctccagtctgcccccagcctgcaccacctagtccactgcaaccttggggctcaatgcacaccccttctctgctcccatcatccctcaggtccctctgcttctacaaggtcaccttgccttctgcgtgtctgaaaaaaaaccctgaccggtccacagcaatattctgaagatgtaatagagacacacgtgtttgggagaaagtttcagaagagataaagtcaagtgttaatttatagagcagtttaaacttcacattgtttctccaaagacccattcccccagaaagtctaaaatagtgatatgtgccaacctgcaggggaacacgggtcagaacactggactcagcctccatttatataccatatatgtccaaatcaggcattacttacattttcactgaatggaaagcaaaagtgctactgtaagtacaagtaaacttcaagaaagtggtgctgtgtgctgcaagtgccgcccatacagggatacaggtcaaatctaagaaatctactcctgcgagccttttgccagccatgacacaaggttaaacaataatagtataatcagatttgataagtaactaaagaaatcaaaaagtcttggatcatcaggcggtggtggtacaccctttaatcccagcactcgggaggcagaggcaggtggatctctgtgagttcaaggccagcctggactatagagcaagtttcaagacagcctccaaagctacacagagaaaccctgtctcgaaaagcaaacaaacaaaaaagtcttggatcaagaagactatcagaaatagattgcttctaaaatcattgacaattttgcctaagagagcatcatgccctgagcaggtaaccagagctggaatgtggctagggcaactagccaggcatttcactgctgagctttcggaacacaaagacaaacctcagtcagcttgcttgaagctccatgacagtgacacattatttaacccatacttagatttcacaaggagcactaaatcatttcgagatttcttactgactaggtgaaaagctaataaacaacatgatagatttgatatttagaccagagaatcatgtaacgtcctgattttaggtgcttgttttctgagttaggagggtctcatgcatcctcgaatggcctagaactcaccacatagccaaagatgtccatgaccttctgatcttccagcaccccgaccccaagaactgggattggaagcatgttcctccatgcctggcttatgcagtgctagggatggcgtccaggactttgcgtgctaggtaagctctccatcaactgagctacaccgcctgccccagccccaaatgcatgtcttttctcactagatcaggtgaatgactcatgctactataaatgtgctgtgattgatagcaattcaaaaagggagggaaggagagagggggagggaggaaggagcaaagggagagcctcctaaaccctcctactttcaagttcttaacaaaaacataacagctgatcattcctggagcggtgacagcaaacctcttggtatctctccatcagcaccaccctcacctcacagatgaattgtcttcagctccctactttcccacactctggctgtccgacccaggcggcagctctccatctccatccaccccctgcctgcccgcccgcctgcccgcccgcctgcctgcctgcctggctgattttctataaataacaactgcctccatccattatagctttatgctatccgtcatcacaccagccctatacagaaattctccccacttcccatatgaagatgcagagctcagctgtaccagtgtcagtgtcacgtgccctgtgaggacattgtccaaccccaaagcccatctctgcaccaggtaatccttcccagttcccgcatgtaagtgtgcctaagcctctcccccaaattccaaattccattacaaaagatttgggggctacacctccagacactgttctgaggatctacatggtcatccttggctacacagttactttctaaaacatcccccatcccccagggggcttcggaagcaagtgactggcagcagcactttagaaaatgctagagagagagcctgagtctggaacacacagcaggaggctgtttatccacactgtagcgtgatgacgatctccaaggaaatgtctgtgtaaaaggtgctttcttttgtggaagagttagaaaaagaaaggaaaggagaaagacagaaaggaaagaaggagccaaacatattctggtccataggaaacaggcctgtccttgacagccagtcacactcccaactagcctgccttctcagacaatccttgtctcaccgaggtacccggcatgcgaacattggtacctgcctaggagaagacccacgctgggctctctgacttccaaggtgcagcacagagccccaaatgagtcacaggtgtagtgggatccccagactcatgcagctttgcctgccgaaaagtgtaagaacatagctagctctccacaggcaggcagcgccacgaagaagagtgtatcctgaggaagctgagggcccagaagtcctaaggaagcaaactttctgcacaaagcccagagatcttcttgacagaaaaataacattgtggtttaaattagaggttggggaagggggtgagttaagaggtaaaatgcccaccgacagtgtaaaggaaagtgttcagtgtcgggatagctcaaaggtacaagccttgcttagcttgaactaggccctgcacctggcccctggcacagtggcaacactgggctatttgtttattctacaatggaggactaaagcacaacttcctttggggtctgtgttgtattctttggtgacctggagggaaaaacagtgctgaaaataaaaattacagctctaaaaaccaaccaaagactactaaccagagggtgcagcgtgcaacacccatctgaactcttaacactctagtgggaccagggacccagtgcaaaggcatcttcttcactaccttctgtgtatgagcccttccttgaagcaagagaatgagggggtctcttggctatcaagatcctgggaaaccagggctatacacccaagccatcttgggtactccagacaagtccacacctcaggtgttaggcaccagtgcaagctttgggattgcatgctacatcagcctgcactgtgataagctgttagggagactttggtgactatgtctcatgtctattgtgtgctgccatcacaaagtctggttgtgcatgttcctggggtgaccacacccctccgcgagtcccctgcccttacctaaaggtttgaggctcgttccttctgcaggtggggatgctagcatacatggttaagtgagtgacgtgtccattttccacttggattttaccttgagcaagccttaggtgatcctagaaagtttgtcttgtgaaactgttgaaggggtactttccatctcaaccattggtgctttcgtataactttccagaactgattcatacgtatgggtgtgcatagtcgtactgcatgggtatgcatgcacatgtgtgtacatgaatgaatgtgcatagtcgtgctgcatgggtgcgcacgcacatgtgtgtacatgaatgcgcacagtcgtgctgcatgggtgcacacgcacatgcgtgtacatgaatgtacatagtagtactgcatgggtgcgcatgcacatgtgtgtacatgaatgtatagcacagaggtcaactttgggtgttcctcgggagtcactcattcttgaggtaatgcctcattttgggatctgaggctcaccacttaggctagatcttcccgtgtctgcctccccattgacaagataataagtgcccagctttttatgtgggtgctggggttgaagccaggcccttatgtttgtacatcaggcacctttaccactgagacatctgcccagccccaggagtgattttcatcaccactttcatgaagacattctaagagtaaaaaggagaaatgccaacgatctgctgggcagcacatgcaggctggtccacccagggtggacggggacatataatcactctacttatgaaagaagtgaagaaaaataacacacacgaagcagagtcccagctgacatgaaacatgaacaaaaatgatgtttgttgtgaagacttggcaccacagcaaaacctatgaaggctgatcagtacagtcccttatagctgtggaacttctttgtcactcccttggaataatggtccctatttcactgggtcatcaagggggttaaatgagtagatataagtaaagcacttagaacagtgcctggtacatactgggagatgtataagcactgtatcctattactaattagcaataacaaagaataaagaagtgctctacaccaatcaatgaagtcaaaccgcaaggacagcatattgtttccaggaatggcatgtcatctgaccacacatcaggtgactgccctttggagtcttacagtcctccatgcaagccggctcccagctggatttccctctcaccttagcctacagacgatcatcgccactctctctgctcactctgaatcagtcttgacttctctccttccatttcccccaccctgactcaacaacactttccatagacaaaatcctctagggcattttgaaaactcttttgtagacgatttccccagctccttcatttcccacaacatacttcagacttgctccatctcctctagctttataacctaccgtcttccttctcattcatctagacagtgcagctgggtgcagaggcttgggcctgcactagggaggcagaagaagatgggtcataaattgtaagcacagcaagaccctaccttaacaacaacaaaagacagcagagctcgaggtcactagagagagactacatccataaccaagtcaatgtccataaccaaggtcaagacatttgcagccctgggtcctggcctctcgggtgtcctgtgctctctgccttgtcttgactctctaaatacaaacatacagcacagtttacggcttccaaactccctccctctatctctctctactctctctactgcccagtagcctgtcctccaggttcttcttgtatctgtttatccctgaagccactggactccactacctgccacttggctggcaagtctgtcccacgagaggttctcagtgaacatgttggcgctgaaactgagggatgtttctccattatcaattacttcatatcttcaccatatctggcttggctcctgtctctccaagagtctctcctgccatggcttcctctggctttccctcatctctggccccttcccatgttctacaggctcctctctgcgcccccaaactcactatctctcccagttctgtccttgactatcttttattttctctcctggacactgtatgctgacaactccgaagcccatgtctctagcagatgtcccttgtttatccaattgacttttctatgttccacaagctcccaggccagggatgaccacagtcaagctcattagcctgctccttgggtgtcttatctgaatgtctggtgtcattatttaccaagtgttcacgccagaagcccggctttgtgcttgactttccctagtccatcaatcctgccaaccaaacagcctgccagctgctctccccaccgcatttcacatcgtttctcaggctatttgcaactccagctcctttctctgtgatgttagaataaaattctccttcagacactgaaagcttaaccccaattagcccattatctcttaggacatggttcctgtctcccgctccaacctttcatctctcatcaggtcccaaatatctataaagcagactttcaattcccagatgcttgtgtttcatgacactctggggttttgatttgctgtccttctgctgaagtgctctctgctctgaagtatggttggttttcaaaacttaagaactaataagtttgtaagtcatgtgctacctgctttagtctgcccactagaaaacacgctcacccccaccaggctgagtcaactgcttgtcttgtgcaatattcagtcccctcaacatgtgactgctgattgacttgtaggtctccctgactaaactgggaccttgactaattagaatccaatccgtcttccacctccagcttccagcatgttacctagtgattctctgcaaatgctttccccattgagccacctcccagcctggagagtaattcttacaaatcgagcaagcctgactcccaccccccagcccctctgcccctgcttgctccaccatgtgctcctgtctggctaactgcactttggcgagaagcatgtaagagtggccccactcagcacacacaatgttgcctggaccttgaccatctatgactgtgagctaaatgaacctctttcctatagagtcggtccgtttcaggtactacagtctggtaacaacaggctgaatacattcagggctcaggacaatatgcccgtgacagatattctgaataggtgaggattctaaagagcaaaaaaggaattgccattatgagttttcattcagtctccctttctctagattcaattatctcacctcctttagctattccataaatggcaacatgctggatgagcaaatttcaattttacgcaaagttattagactctcaaatgagatttgtaattggcattcacaagaaatcaattattagtagttattccagtcgctctccctctacgttcggcttgtgcgagcatttaggatgctctaaagagcacctcgtgccgcactgccgtccacgtccaggctgggacagttctgcccacagagctttctatcccaaatcttagggtgttatgatcagtcttcattttctgtttaattaatttcaaggtaacattggcctagttgtggaaaataagcaattaatacatttagtgttaaaatgttttacaattccttctaagtaatcaacttgtcaccccataaatctggtcatactaaacaaatttatgttttaaataggtcatctctagaaaacaaaataccttgaaacaattacggcataaggcactaaatatagaaattataagctaaaatgtgaaaataattaggacaaacaatttttcaaactatcctttcaattagaaattaagtccttacagtcatctcaaagaaggaaaaagaaaagaagtctttggagcgtttaattttcatctatcaccatcattgctatgtagtccctgtaattgatggcatttgattcggggtcaattgcagcagacaacatttcttccatttcctcctgagaaaaaggctcacctggagagacaagaagggagaccatcatttacagacgggagatttttctctttcctctagccagctccattgccatggggaacacaggcccccagctgtgtctagtttctccacgggagctggacggccaacacctgagaatctggaagttcaaaaggcgtgctgccacaccctctgcaaggccgcagactcactacctggttgttacctatagaacacatcatttcagtcaaaacagcagcagaacataaaacaccatgaaagaagttgtttactcacttaaattaaaattagtgaaattgcaaaagtatctgcttgaagctgaagttctatagatgaatctaattattatgttagtgaaactatgaggagatagctgaagagagagacaggacacttgatcactacatcaggtatctctcacactggtttaaccccaccacagatgccactcatcaatcatccttgtttcagtctgggctagttgaagtcagatgaaatggaaagttagagagaaaaatctgtgagcttcagttggactcaggtaacaattgagagccatcttggaaactggcttcaccaaggtaggacacaaactccagaaaaatatggaagccaggaggggggggaggggaggagcacccagcagccagtactcactgacactgattgaagtgtttcacacatactaagttaatctcccagacacctcacaagaggagagaactacatctccattcacagcacatgagcaatgcagcctgccctcaagtgaacggggacgagtctgaacgccagatgacaagcttggccgaagcactccacagagctgcttagactaagccttgaccacaggagtccctctgccacactgcctgcacagcatttgggttaagatagcaggaaaactgctcaacactgagaggcacatcttaaaggacaagcctcacagagtcaagttctagccctcttgctagctttatgatcttgggcaggttgcttaacctatcttcccagtctacacaatacagatgatgctaatactctccacccatgggcttggtaaaaggattaaatctgttattattcaaatagcacttccacaaacatctgacacatagcaacatgcatttgttttttaaaggcttaagatcttttctgatgctaaataccatctgatgcaatatacatactggacacacatgaactctgtctggtagatacttgacaggtacttgtaggtacactcagtgtggtttatggtgtctatcttacaatctcctgggcatttagaatgtacattcttaaacttaaagttgtgttggctgttctgtggatactatgagaggacatggaagtaactttatagtccaaaagcttggatacacttaaaaacaatttggaattttcagaaccaaaatagcacttcttagccaggcctgtggcgcacacctttaatcccagcactgagaaggcacaggcaagtggatctctttgttcaaggccagcctggtctacagagagagttccaggacaatcagtgatacacagaaaaaccatctctcttaaaaaaatatatcatttcttaagcaaccattttactgaactaggcagctgcaaatgtacttagaggaagagtgttttccatccaataataatgatgcattaagatatcacagtgcatcttatatgtacctaacaaatatactggctcagacaacttggaagaaattgaataatgttgaataaataactgaaaccatttatatccttctctgaaaagaactgatgcaggctctgtctattaggataggcaacagttgccctggagtacaagaactctgtaagtatgccttcctggaagttctcatgaagcatattcctgtgacccacatggccatgtcatccctacccacagtaccgtagtgcctgacttcactgtctcagtcggtagcattactattattgacatccatggtccagggcaaaagcctggtgttcctttatactcgtcatccattttcgtcccctgccctctgttattcaccatggcccagggtcctgtgataaagttatactgcattaattcccttttctagtccttgtgccaggccaggcctgtattagggaaccctgggaatgctgaaggagccccctgctcatctcgctggctgcacctgtcttactcacctacaaactgaccagcaccagaatcactttcccacagcactgctacaatgggtgactcagtccaactctccaccgcccaggggatgccctgagctcaagagcaggcctctacaattcagccccaaaccacctccctccctccaacaagactcaaaggctggctgagctcgccttcttccttgtacctggctgccttccttccagattctgttccatttctccatttcccacaaaccaactgaatctgtcttcaatcagcttctcatttgttcattcatagcgcatctgttgaaactcacatgctgatactatgatgtgtgagggtgctataacatagatgacctcactacgcctgccctggatggctcatcccatcttagggtgctataacatagatgacctcactacgcctgccctggatggctcatcctatcttagggtgctataacatacatgacctcactacgcctgccctggatggctcatcccatcttaggatgctataacatagatgacctcactacgcctgccctggatggctcatcctatcttaggatgctataacatagatgacctcactacgcctgccctggatggctcatcccatcttaggatgctataacatagatgacctcactacgcctgccctggatggctcatcccatcttaggatgctataacatagatgacctcactacgcctgccctggatggctcatcccatcttaggatgctataacatagatgacctcactacgcctgccctggatggctcatcctatcttaggatgctataacatagatgacctcactacgcctgccctggatggctcatcctatcttagggtgctataacatagatgacctcactacgcctgccctggatggctcatcctttcttagggtgctataacatataagatctcactacgcctgccctggatggctcaccctatcttctgaagcacagaatggtggctcccatctgtaatcccatctgagaggctgaagcaggagaattgccttgagtttaatgccagcctggcatacgtagtaaacaccagattcatctgggttatagaatgcaaccctgtctcaaaacaaaagcaaacgaataaacctaccttctcaaggaagctattctctcttcccaggccaacctttccaggctagtttcagcttgcattgatcttctgatagctatttttctaatgtctcatattgatctatttcacaagttagctttgcttctcaagaaagggatcagattccagtgtcattaccgtccactgtgctttaccaataaacatacaacaggcacacagtgggaatgactcaacctctttggctgtttttattaatttcatgtggcccaatatactttagggttaacttcctttcatcctgggttaattagttaagttaactactcagatgattttaacatagtaggggatcctggatggcagctatggctttcatcttactccttctctcacttcctgtttcctgagggggaactgagttaaaatggccaaatcaggtgtgcatagagcttccagtactggtctccttgctcaaaatgatacccatgtccatgtccaactgatgggtgactgttgcatcactcaccacgtggcctgtgcatctgggagctgaagatagtgcagggtgtgtgtgtgtgtgtgtgtgtgtgtgtagaggaagcagaactccttccttagtgcagggtgtgtgtgtctgaacagcattaatgattgtccatcatgctgcttacagttagcggaaacacacacacacatatatatattgacataaaaagagaacatttaaggaaatatataggtatttgtcagaggaggtcccattatcgtaagaaaatacagttttgcgtgaatttgcattcaattaggctatattgtttgcaactttaccaccgaagacagtcttttgaaagaaatttttatatactataattcaaatcttctgtctaaaaaggcattggtttatgattgacagctcatattaagtggcatgtcttttattcagaaaatattttaagtgaataaagtaaacacaatttatacaagtaatcattacacttctattacacaaaatcaaataccaaaccaaaataataggaataataaataaattatttaaccaaacaattgcttttaaagtatcgcctcccataacttttgcataattgtttagaacttattaattgggctggagagatggttcagcagttaaaaccatgcactgttcttgccaagaacctgagttcagtttccagtatccatgtcaggttgctggcaaccatctgtaactttagctacaggggacatgatgcttctggtctctatgggtactgcattcagatgcacagacacacacagacacacagacacacagacacacacacacacacacacacacacacacacacacacaattaaaaaataaacatctttaagcctatttatctttgcataaattactcaaataagaaataaagtgctctgaccttcctcagtcatgtatttgatcagttcgtccttggtcagaaaccctcgtttagctggatccaaaacctggggaaagtagatatattttctttgttgaataaatactatatgatgaattagtttttcacatatacatgaataatctggagttcacccacctcaaaagctctgagaaggacatcttcaccaattggtctgtatctgtaattttacaataaagtgagttaatgccagcatatttatctcagtctctacatgataaatgactgcattaggcaaaataaaagccactaatatactatgctaatggcatttcccttgatgaaatttctttggatttctggatatgaaagtcaacagtacctaccccacaggaatgtttggtattacctattagcattttctcattgatataaaaataaatttatctacaaccaaaacatctacaatcaatcaactgtcatatgctaatgctgtcttatgctaggaaagtaactaatgttaatttttatttttaaatagtaattcacagttaaatataactacaatgttgttggttttgtagctccttttccttttcattatttcttgcttgtattaataaatgctagcatggtttatatttataagcacatccctaaaccagtctgcagtacactgaaaggctagaggaaactaccctaagatatagactgggtaaataaaatataaaaggccaagtggtttggtttggtttggtttggtttggtttggtttggtttggttttgaggcaaaactctgtagctcaggatggcctgaaactccataactaaggctagcctcaggtttgtggcaatcctccttcctcagcccatcaatgctggaattacaggcataaggcatcacacctggccagccaaatgttttgaaattactgccattctagttatcttgtcttaaaattggatttacttccttactttctttccagaagtgctttggtcatcactggaagaaacttttcaaaacgaatgtatccggtgggttcctcttcttccacctgaacaattagaaacagtcatttattcattcaacaaatatactgagcaactactttctttcaaacactgagacaaggttaggacttggtgatgagactatagacacaaatgcagcttgtggagcttgttttctgcaggagagacacatacaattcagtaacctgcttgccactcaaccctgaggacctaaactcaattcctagcactcatgtcaaaagcaaggtgtgtaattgcatcacagtggattgtcactcagagttaacctctggcatgtgtgctcccacacaccgaacacaaaagcaagtatccaatttgtttttactatgcaaacttgaaatgatcctcctgctcagcctcccctatggtggtatgtcagacatgaaccaccatgcctggcttgaatgtctaaatctagatctatgcaaacaccatgagcaaaggaatgtgggtctagtggagcacagagcacaggaagcctctcccatcagcgcatcagggaagtcactggcaactgtagtgtctgggctggaagaggctggagagagaccctatcatccccagaacagccattccctgttatcctgagaacaatgcaaaaccacagacagtctcataggtgtgtgttttgaaaggtcactctgttgtggatgaggtggctacttcagacaaagggtgatggtgcagattggagtggtggccatgaggagagtgggtatgtgacctttaagaagacttgacagagtgacagcattcacccattacagattagggggaaaaggcatctaaaatgactcccagattctgacttgcacaaatgcactgtctttccgtgaaatgaggaaccctgaatacatcatctcaaggaccgacctacatctcaaatcattcttgtacttatgaaatactttcctgagtactagaactctgctctgtcatcctaagttaagaaaatactattctaaagatgagagcttttggcacctagcactacagaacgagaaagaaacaagtcttttttgcttccgggttcaactccgaccgactgaacaaagctctactgaccttaacttccatgtcaggcaatttatacggagctataaatcctgcactttctttcaaaaatcctattaaaaggctcatagatcccaattgaacagatgagtttttaagagatttattgtttcaacaaaaaataaatctatgggtggctattaagtagaatacactgtcatccaaatgacaactatttttaatgttcatatgagtctgtatgagtagagtcttcagaatccattatcagagaaaatcaaacccatctagggacatcatgtttcagaatttctgtaccatgtgaacaatttcttcagcttcctctaaggtctatgatgagcattttgacaattcatgttaatatagctcggtagtctgaaactcccagaacacagagacttaaaggttaaacatctgaatgcaggtgaggctcagtggtagagtctttatggactctggggtttaaacctcagggaagactttttaaaagtcaatctctgtgtctcctggaaacttcagagaatctacaccatgaagtctcaccaacattgaagatatgatagaagaaatagatacaacagtaaaagaaaatgttacatctaaaaaaaaaatccttacacaaaacatccaggaaatctgggacattatgaaaagaccaaacctaagaataataggaataaagaagaatcccagttcaaaagcccagaaagtatttttaccaaaaatcatagaagaaaaatttcccaacttataaaatggcatgcctataaaggtacaagaaggttacagaacacctaatagattggaccagaaaagaaagttccacgccacataataatcaaaactctaaacatacagaaccaagaaaaaatataaaaagctgcaaggggaaaaggccaagtaacatataaaagcagacttattagaattacgtccgacttctcaatggagactcaaaaggccagaaggccctggacagatgtcttgcagactctaagaaaccacaaatgacagccagactattatacaaagcaaatttttcaattatcacagacagagaaaacaagctatcccatggcaaagtcaaatttaaacaatatctatccacaaatctagccctacagaaggtactagaaggaaaattccaacccaagaaagttaattacacccatgaaacacaggaaataatttcacatcagcaaaaccaaaaaaagggaagcacaacacaaacacacaattatcatcaaaaacaacaagataacaggaagtaacaatcattggtcattaatatgtctcaatatcactggactcaattcccaaataaaaagacacagactaatagaatggttacaaaaacagaacccacacctctgttgcatacaagaaacacacttcaacctcaaaaacagacattaaagtgatggaaaaagatttttccaagcaaatgaacccaagaagcaagctggtatgtctattttaatatctaacaaaatagacatcaaaccaaaattaatcaaaagtgataggaaaggatacttcatactcatcaaaggaaaaattcaccaagatgacatttcaatccttaacatccaagccccaaatgcaggagcacccacatttataaaagaaacattattaaagcttgaatcacccattgaacctcacacattaatagtaggagacttcaatacccaactctcaccaatggacaggttatccagacaaaagtaaacagagaaataatagagttaacagacagtgtaaaccaaatggacctaacagatatctatagaacatttcatccaaacacaaaagaatatactttcttctcagcacctcatgaaactgtctccaaaattgaccacagactaagacacaaagcaagtctcaacagatacaagaaaactgaaataactccctgtatcctatcagaccagtcacagattaaaactgtatttcagcaacaacagaaagtctacaaaatcatggaaattgaacatctccttattgaatgactattgggtcagggcagaaagacagaaagaaatgaaatgcatgcacaacatacccaaacttatgggacacaatgaaatctgtgctaagaggaaagttcaaagcactaagtacctgcataaagaaattgtggagatctcatactagcaacttaacaccacacttgaaagctctagaacaaaaagaagcaaacgcccaaaaggagaagaagacaggaaataaactgagggctgaaataaaaaaatagaacaatacaaagaattaatgaaacagagagttggttctttgagaaaataaacaagatatacaaatacccaaactatttaaaagacagagagagaatatccaaactaacaaaatcagaaacagaaaggggacataaaaatagacaatgaggaaagtcaacaaatcattaggtcatacttcaaaatcctgtactccataaaattagaaaatctaaaaaaaaaaatggacaattttcttgatagatacctcttaccaaagttaaattaagaccagataaacaatttaaacagacctataacccccaaggaaatagatgccatcattaaaagtctcccaaccaaaaaagaaaagaaagaaagaaaagcccaaggccagatgtttttaagcacagaattctaccatactttcaatgaagagctaatgccaatactcatcagctcattccacaagatagaaataaaaggaacattgccaaattcattttatgaggccacagtcaccctgataccaaaaccacacaaagattcaacaaagaaagagaattacagaccaatttccctcctgaacattgatgcaaaaatactcaataaaatacttgcaaaccaaatccaagaacacatcaaaaagatcatccaccacgatcaagtaggcttcatcccaaagatgcagagatggttcatcatatgaaaatctgtcaacaaaatgtaccatataaacaaactgaaagaaaaaactacctcatgatcatcttgttagatgttgaaaaagcctttaacaaaatccagtaccccttcatgataaaagtcttagaaacatcagggatacaaaggacattaaatggagagaaactcaaagtaatcccacaatttaaaaaaaaaaaaaaaaaaaaaaaaaaaaaaaaaaaaaaatctaaggcaaggcgttggtggcgcacgcctttaatcccagcacttgggaggcagaggcaggcagatctctgtgagttcgaggccagcctggtctccagagcaagtgccaggataggctccaaagctacacagagaaatcctgtctcgaaaaacaaaaacaaaaacaaacaaacaaaaaaaagagctgtcaccatccctgattttaagctgtactacagagcaattaaaaaaaaaaaaactacatggcattggcataaaaacagacaagttaactagtggaatcaaattgaagacccagatgtaaatccatacacttatggacacctgatttcagcaaagaagccaaaattatacaatggaaaaaagaaaacaaaaaatagtgctggtctaactggaggtcggcatgtacaagaatgcaaatcaatccatatctatcaccctgaacaaaactcaagttcaacttgatcaaggacgtcaacataaaatcagatacactgaacctgacagaagagaaagtggggaatagccttgaacacatagcacaggacacagcttcctgaacaaaatatcaatagtgcaggcactaagattgacaattaataaataggatctcatgaacctgagaagcttttgtaaggcaaaggaaaccatcaataggacaaaacggcagcctacagaaagggaaaagatttttaccaactccaaatgtgacagagaaataatatccaaaatatataaagaactcaagaaactagacatcaacaaaccgaataatccagttaaaaatggagtacagatctaaacccagaattctcaacagaagaatctcaagtggctaagaaacacttaaagaaatgttcaacattcttaaccatcagggaaatcaaaacaactttgagattccatcttacacctgtcagaatggccaagataaaaaactaagtaacaattcatgctgtcaaggatgtgaagcaaggcaaacacttctccattgcttgcagaagagcaagttctacatctactttggaaatcaatatggcggtttctcagaaaattgggaatcaatctacctcaagacccagctataccactccatcctaccacaaggacccttgcccaactacgttcacagcagctttattcatgatagctagaacctggaaacaacctgatatctctaaatcgaagaatgaataaagaaaatatagtacatttacacaatggaatattattcaattttttaaaatgacatcgtgaaattcacagacatatggatggaaaaaatcatcctaagtgaggtaacccagacccagaagacaaacatgctatgtactcactcataagtggatattagctataaaggacaatcatgctacagtccacagacccagagaggctaagtaataaggagggcccaaagcaggatgggggctatgaatctccatgagaagggaaatagaagagatttcctgggtggactggggacaggtgtcgatgagaacaggagggatcaagtgtggggggggtactgagagagatgactagaattaggggaccttttagtagtaaggtagaaacctagtgcattggaaactccttggaatctacaagagtgactagagcaaacacttctagttttggagcatacggtgccaggccaggtgtcttctgtaaccaagcaaggcttccagtggagagattggggcaccaacccagccacaaaacctttgacctacaatttgtcctgcctgcaagatgtcctgagggaaagatgatgcagaacttgtgggagcagccaaaccatgactgatccaacttgagacccacaccatgagagggagcccatgcctgacactgcctggagggccaggaaccagagactggatagcccagagacctaggaaagaaccaaaggtgatgggctaaaaagagaaaaaaaaaaaaaaagccaatgaaatgattcctaatgataccctgctgctatcctcgtggaaagagccttagcagcagcaactgttgccgaaagccacagtcaaacattaggtggagctccaggagccagcagcagaaggggaggaaggaccgcaggacctggagggatcaaagacatcataagaacacagcccacagaatcaactaaccgggctcagaagcgatcacagagactgaaccaacaatcagggagcctgtaggggtctgacctaggtcccctgcatatatgttacggttgtgtggtttggtgttcttgtgggactcctaacagtgagaacagggactgtcactgactcttttgcatgttttgggacccttttgcctcctggttggttgcctcatccagcctagatatgaggcgctagtcttactataacgtgatatgccatgtttggttgatatccctggaagcctgctcttttctgaagggaaatgaaggaggagtggatctgggtgagaagagaggtggggggaagggctggagctgggaggagaaactgaggtcagggtgtaatatatgagagaggaataaaaaagaaaaatctattttcagtatatgtatatttacaggaaatgaagaaatgttggtaataggagaaacagtcttccccagggaagaattccatctaataccacatggtcagcctgaaaatatacatacaagtaacattatatgcactgatcaggttgtatttatatattttgggggatatatatatatatattaaagacaaagaggtcgggctagagagatgggttagaggttaagagccctgactgttcttccagaggtcctgagttcaatccctagcaaccacatggtagctcacagccatctataatttagagctcgtgctctcttctggcctgcaggtatacatgtagagcatttatatacataaaacataaatacaataaaatctttttaaaaaaagacaaagaagtcataaacttaaaagagaactgtagttgagagccacaggcagagagagggggacacatttcctccaacaagaccaaatctcctaatccttttctttttctttttctttttctcttttttttcttttttcttttttttttttgtttttttttttgttgttgttgttgttgttgtttttgtttttcgagacaggctttctctgtgtagctttggagcctatcctggcactcgctctggagaccaggctggcctcgaacttacagagatctgcctgcctctgcctcccaagtgcccccctctttctctctctctctctgagacagggtcttgctgtattacctaggttggccttaaaactcttaacctccctgccccattttctccagtgtgagaattacaagtgtttctcatcatgcctagcataaactttcttcagtttaaacaaaagaggaaggacaatgaatataaacaggagccttgtgacttaaaagtaagaaaatggatggcgagatgtctgtacaagcctggtggcctttactcagtcccagaaccaaggaaagatggagagagcagattccacaacgttgtcctctgaccttcacatatccactgtggcatcatgtgtgtggccacagacatcatatatacatgcacaggtacacaaacacacacacacacaatttttaattccattttaaattgtttttagaagtccattttgaaactgtaaaattctttctgtgacccaacactgccctctagaggccatatctactatgttctctaaacatgtgtaagtaatgggatttaaaatacgacattcatagaatgtttaagaggtgacaaacactattttattgcaaatggttttatattcaaataatttcctcttaggatagtttttaacagaaagttggaaagataataaaatattctcatcagcacttctattgttttaaattctttaaatgttttattgaggcaagattgacaaattaaaattgtatatatttaaatatacagcaaaatgctttgatatacacatatagtgaaactattgcaacaactaagataattaacatatctatcacctcattcatttcctgcttgtataacaagaacacttaaattcactgtgggttgtttctacggggcagatgatcagaacttttgctttaagttttcattttcagaaatactgcaaagtttttttacacagtatatatttaactagtgctcactattatggtctggtaaataaagataaataagccatgatgtccccaccaaaaagggaaaactgccaggaatggtggttcatatttgcaatcccagcacttggaaggaaggctgatgcagatggactgacatgagttcaagaccaactttgtctacatagcaagttccaggccagcctggaccacagaataagaccttgccaaaaaaagaaaaaagaaaaaacaagaggtcatgggttggcaggcagggtgtgggagtggtaccgggagaccctagggagggaggggagtgggaataagaatggtcagaatacattgtaagacattctcaaggagttaatagaaatactttaaagaatgcgaaacaaggacaagagccttccaaatggggaaatttgggcaggggaggggggtgagggggggaggggggacagggtggctcaatagataaagcaccggcccagcaagcatgaggaccagagttcagatccccagagcccacagaattgctagaccagccaacaggcaagttctgtgttcaagcaagagactgacctcaatatataaaaaggaaagcaatcaaggaagacaccagcgttaggctctggattccacatgcatgcccctgcacacatacgtgtgtctcaacacatgtggacaacaaacacattggggaaaatgggaaatttggacacaaacatgttaattgggaacatgccactgagcatgaaagtggctacccagatttttaaaaagaggggggaaatggggagtgtaactctctggtagagtacttacctggcttcaacctctagctttgggaagggaccagaggagaatggcagagaacataaaaccagtcctcagaacagttaactgctaaagtttaatgtacctccagcaaacacctgtaagacttgtttatatatgttaaatacctatagcatatttttatccaaagtggttgaattactactcaagcagaaatggtaacatgcaattgcaaaatttattcacaattcagaagagttattttacattgttaatatagaaaaaaacaggacgaggctggagagatggctcagtgtgtaacagtactggctgctcttccagaggtcccagctcagttcccagcacccacacagcagctcacaaccttttgtaattgtaacttaaaccttctgacctctaagggcaatgtgtgcatgtagtacatatacatacaagcaaaagagacacacacataattttttaattaacttaataaaaaagaagaaaaagaccacaggacagttgagatgtattatactttccaggaaaaagctcaactgttaccaaggtagagtgaagtcagttcgagagcctcacattgggaatggccactggcttcttccggtacggattagggtctttttgaaaactggacactgccttttccattacatggtaatcaatgctacagatgtagctcagtggtagagcgcttgtctagcataggctctgggctccacttttagcaccaaataaataaataacatattcaccaatgttttgaccaaggatgaacatgcacacacctttaatcccaacagttgcacccccccacacccccacccccgagtccaaggccagccctgtctacagagtgagttccaggactgcaagggatacacagagaaactctgtctgaaaaaaaagaacacaaaacaaaaacctatcttctaatcagggtatatagtccagtggtagagtgcttgcctagcactgcaaactaaaacaaaccccctccagcttctgtgtcatttacaacacaggagaacaataatgtctacttgaaggagttgtgtgacagttttatgaggcaggatatgacggcttgtgaacagcaagacataatgacattacccacaatgtaaactgtcttcttctatgtggtgcaacgctactcttccttaaaagactctgtgcagaaactccaggcataggcacactcactagccacatggacctgtttcttcagaagtttggccttacctcttatctgttcgttgctgttttggtttgggttatggtgctagatactgaacttagggcctacaagtgctaggcaagcactctactacaaggctatatactcagcaccctgcttcctgtctataaaacgccatgtgaaatgtagcaactaataatacaaggcattaagatactaggtataagctggtggtggcgttggtggcgcacacctttaatcccagcacttgggaggcagaggccagcaggtctctgtgaggtccaggccaacctggtctacaaagtgaatttcagaaacagtcaggactgttacacagagaaaccctatctcaaaaaacataacaaaacaaaaagatgctaggtatagtgaataccttgtcacttgccctagaggacaggatgtaagtactggagtgacctgacccaaccaccacacacatacacacattaattcctcataaatgtctttggactgcacaaagagactaacatgtatccaaacactgtggccctactcttcaaaagaccaagcccaggcgtgggcatatggagcccagctgtcagtgtttgtctgcagtgaatgaaggcccgggttagatcccacacacagcagaaagcagacatgacggcccacgtctgtaatctcacactgggaggcagaggtgtgagaatgggaggcaaggtcatcctcaactacatagagttagaggccgatctggaatatatgaaaccctgcgtccaaaacaacgaaaaagaattaatttaaaaacccagttccactagtattgtaaatgtgaagcaagtgatacccgagttggttccatctatgaggaggctccacatgctgcaaagcagcccaaacagcagttacagcaaagtccactagaaagcaccattcatttgagtagtgtcctctcaggtacgcttgtcttctcatcctccaagagtggaggtgaaagaccccgcccccagacttcccgccaccaaaggttccctctctaaggctgtcatggggtcctcagacgctctagggccctgcgacatggagctgactccacaaatatagaaacactacagtgttttctacaacgccaatgtttaagtctcaatgcctgcagaaaacattattttccttctactttagtgcagagtccgttttcctgacctgttttgcatctgagggcacacaggccttgggaggttaagtgcctgccagagggcctcaatctgtcaggtgtcctgatgggaacaagtctacacttctttcctcacatctgcacgaaatcgtaaggccatgtcttcccattacagcattgtttattttaatgccaaacccactcagctagaacaacaaaatacaaagtgaaaattcatctctacctagtggcataacaataagccagtaagatgaactatttcatgcttcacaaaaacacaggacaatgtgagtagctaaaaatggcttataaagcactgcttccgaccaacaaacaagaaatacatatggatttttaaaacttgtagcaaaaaaacgagatatttcaagttagattctaaataccatctaacacattaatttttatataaaccattcttcaaaaatatggaaaatatctagccttggattgagtaaaataataacaaaaactgatcaatatttaccagaagtattccctttgtaattgattttaaatgtttacttattttttatcaaatgtaagactctaaatataagtgctcaatcactaagctacaatcctaccccataaatgaaaacaatttaagccaccacctttaaaaaattattaactctgagcagaaaaatggccccatgggtaaaggtgcttctcaccaagcctcaagctgagacaatccctgggaaatgaaagagagaaccaactcctgcaaggtggcctctgagccatgccacacatgcacattcacataagcacacacacaaataaataaataaatgtaataattttacattcctatttgttctaaagattctacaggctgtttgaaaagaattaggacattctataagttctttttatattactgaaagaatttagaaaatagaatgaactacccttttgttgaataacttgattttttaaatccagtggaaacagaatcatgccagtgagcaaggagccttccagttctgaatgtctacaatttgaagccacagagcaaaggttggacaggggcctatgcagccattacttccccacatgcccttcttagggctgcaactgtgctaactgctcaccctccttggctgcttcccacctaggggtaactgcccctcctggccctagcggaattgttttatatttaactggaagctaggtgcttttatcgcacaggcagaagactagaggaataccctagggaatcaaaactgcaaaagaaaattctcgaaagctttggtgctagggactccaaaattacctaaggtttaaaactgactagctctgctagtacaatagtgtcatgaagtttgtgggagtaacaaaccaatatctgattggattgtaaggcccactccttcaagtcatccccaacatacttgggtggcctgacctcgctcatcactgagacatctctaacatgagctggtgagctctcctcattcttccttggttctaacccagccttcagtggattcctaagtagttgtactttaacctagtcctaaaatccagggtagggtcatctgagcttagaaataaaaactaagcatggctaactcaacacccagctcccatcacagctcttctgggtgacgtgatggtgccatagctactgttcccttgctgtgaggagacaccttgaccaactcgaccttcagagggaagcatttaattggggattgcttacagtttcagagcattagtacatggtcatcatggtggggagcacagtggcaggcaggcaggcttgcagctggagcactggtccacatctgatcactggatcacatcagagctcacatttgattcccaagttgcaggcagagagagaaattggacctagcagggtcttttgatgcttcaaagatcacctccacactgcataacacacctcctcctcttcccacaaggccacgcctcataatccttcctaaatagtccaccacctgggaaccagacattcaaataaatgagcctattgatggtggccattctcattcaaatggccacaactggctgctatggaactgtccctctattcaacctctgtttctaagaaatataaccagatgatattcccagccatcatgtctgagcctgactcacatcttccatggcttctccagtcactaagggtgtagcacagccatcaaaataagtaccatgccagcaaggggagatcctccaatgagcaagttaggactgaggatgtgtcatcagccagatggctaaggtcttccttcttctatttctcctaccctcatctcaaacctgcaccgtattctgacactcccccacctcctccagctctgacagtccccactaaacctcttcaatgtctatggctcagtgttagcttcttagagtgtccacaggatcatatgtgtcttcagaagtgacacaaagaacacaggcagccgggcagtggtggcgcacgcccttaatcccagcactcgggaggcagaggcagttggatctctgagttcaagagaccagcctggtctacaagagctaggacagcctccaaagcgacagagaaatcctgtctcaaaaaaccaaaaaaaaaaagaaaagaaaagaaaaaaagaaagaaagaaagaaagaaagaaagaaagaaagaaagaaagaaagaaagaagaaaaaaccacaggcagtgagatggacttctgagtcaggctggcttgttgctttgtaaaatgtgatggagtgctgtggaagtctatagtgataaagatttaaagaaaggaaactggggacatgtaaaagaagaggctcgcccttgcaggtacccatccagtgcaagcagaacaacaccaagaggagaacaatgccataaagcagaactgtaactgtaagaagcctgagggaaaatgaaaaatgagagctttgttaagcagtcgctagatgtcaaggccacatggctctttggcagcgtgtaaagaagtgcttgtctcctacagggaaaggcagactcagttacacaccaattaaacaggagtggggcaattccatgaaagagagggcaataaatattttaggtattgctggatatatatgattttttgatgcagatttttctttactttttatgatatttaaaaatttttaaacatcactgatgttcagtcttcattgcggatttgactctgctaagatcacctggaagaatgaggagatagctcaggcggtaatggtgcgtcaccaaatatcaacagtcatcctggaaatccacctgtgggtgtatctgtcagagtgtttgcagaaagggtcaattgaggaaggaagaccgccctgagtgtgtgcagcatcactccataggtcagggtcctgagctgaatcaaacagagaaggggagtgagcaccagcgttcatcgctctctcctaacagcaggtgcagtgtaaccaaatgtctcatggccctgacaccactcattccctaccagaatggactcaaactgttgccagtgtacacttctctgtccctccttgggttgcttttgcaggtatttgtcacaacagcaagaaagtaacatatatgccatccttagatcagactccatataacagtctgccgggaggcacacacactttagtgtgacatccctgaaatagaaaatgcaacggttaaagacatcaaggcaaatgctaaggtaaaacagataactgaggccagagtcctggtggcaaaggcctggcatgctgcatgtaatgtggagaaatcaaaccacaggtccccctaaggatactaactaggcaaatcccctgcaggcgctaggcttgcatctacccctttctaacagggggtggcagtgttgtgctgcagaagaaggccacttcaggcaacatgcacccctaaggaactgcccttcatgtctctcctataaggcaggctggtaaattgggttaaatcccagcataacctagctggggaggcactgggcatatcaggggcagaaagaaaatacataccgaatgaagaaatgaaactagctagcgtgactaggaggcaagccttgtggcgatcagaggactaaaatataagacaaggaaagcaaaaaactgctcagatacttcccatgtcacagggtccatccctctggcaggaaacccaggagggaagggccacttactgccagggtggctcttaggggcctggaataaataaataaataaataaataaataaataaataaataaataaataaaaagtaagtgaaacggaaaggccagttttctccttaacatgagccagaaaacccaccagaggattgtgttaatggaagggggggcgcactgttcaccgaggggcatcgggacgcactggtgaaaacagcctaagcagcagcagcagcactagggcccaagatggtcgtcgtcaggcctgggttcactaggtcactgggtacacaaacccaggctggttaacatctgtggggtaatctgccagccagctccctctagcccatggcaatcatgcaaagttgtttaagcacacaagctatgaggcctcaaaacactgctaaggctaaacagagaacagaagtgtgctagcggttctcggctgaaaacttgactacatctggaattaactaaaacccaaatgactggacacacctgtgaaggatttttcttaattaaatcatttgaagtggtaagacacacttctaatccaatctttgcagtagaagacaacaccttaacccagatctttcgggatgggaaggtccacctttaatccagaccacttgctctacttactagcagcccgtataaaagacagggaagaaggaagctctctctttctattgcttgctctcaaccgcaatagcaagtccattccttcactggcattggaacccaactgaagaccagctgacacatccagactcgtggactaacaactactggattcttgggccttcccatcataggcagccattgttggattagtaagacctataagtcattctaacaaatcatatagagggtgggagggagggaagaagggagggagggagggagagagagagagagagagagagagagagagagagagagagagattcattctataaattctgttactcgagagaaccctgactaatacacaaggagatgctgagatgcgttctcaagagcacagtacattagtagtgaagcagaggcgaacagagacattgctcaccattcacaacagccaagcgtggaggagcaggtggctgaagacactcccccccccaataaaaaggcacaatcctagcttagctctaaagcctaaatcaacattggtttgtttggtttttgaaacatcttttcgctttcctgtgcaatgtaattctctctaattctgtgtaagtttgaatttcaaaagacacagacctttgcatagttttcctctcctcccagtgcccacgcactagagagctctgacaatatcgaaggcagagctgctgggtaacctgcatgcaggaagagttgctctagcccttgcttcccacagctgctggctttcataacaccctatacaggtagggtttacttgaagcaagttgctacttttggaatattaaatagatgaatcaatgtcaaggaatttgaaaactggtctatttcaagatatttctgatcttcaggaagcaaagagctgagaatttaaaaagttatgttagcgatgtctctgtcctaaaattcaagcacatgatagttagagaattcaatttccagataaaagtttcaaaacttttacagattaataatctatatatttggacagggagggggagaggagagagagagagagagagagagagagagagagagagagagagagagagagagagttcatggatatgtagaggtcagagaacagctgtgggaatcagtttgcttcttccatcatgtgggttccaggaatgaaactcaggctgccaggcatagcagcaaggtcccttacctgctcagccatctgccagccccagaataattttaaaagcacatttaaattgtttgttcttcaagaatatatccatcgcctaaccccgagtctctgaagcaccacagttgtcctgagagtgcttgcatcttgaaggccctctggcttccatttctggaatagggctctggccctgctaaacactacaggtaggtccatctttaagtcacttcgtagagactgtcaagacaagaagctgatggctgtgacatctgactgtcgtgcagcagtgggagttctagattgatgtctgaatgtgatggatgcctagccaaggacaggttctgcgtgtctgggtctgcctcttgctgctgtgcttgctggggccactgactctgggagagtcatccaaaatatctaaaactatttaaactgtgaaacctattgctaaagaatattaatttacagaatagcaatattgactgtatctgcattaaggagccacgatggggcagttcgagtgacctgcagatgtgtgttttaaagttctatcccaggcacaggtgtgtgtccaccctccaatggggaaccagatggattggctggctaccactgtggccacatgcaacagtttgataaaaagatatcatgtttcaattttgtgtgtgaacaacaatatgtacactaaaattgacatttatatgtaaagtttttctattctttgatttttaataagctttagaaaccaaaataaataaataaattgttatctgaagttattatagaacatttagcaatatgatgtttacccttaggtatttactgttgtggatttttcagtgtcctaaatgtatttgataagtataaatatgtgtgttttcttctcatttagctggtattcaagaagggtagtcaaagctgttgtgactctattgctagaatttagctgcaataaattgtgttggcacacccaataaacttttacagaacttatataggttggtgacacaattgaaccataactactatatgtgattttcaggaaaaatgagttcctaattttcaaaattttaaaattacttatatttacaatagttatagtctaattggggtcactagacgtggtggtgcatgcctttaatgccagccagcactcaggaggcagaggcaagctgatttctgtgagttccaggccatccagggctacataatgagactatctccaaaaaaggaaaggaaagcaagcagctacatcctcacaggaaaaccctcctccggaagtcaaaggacactacatgtgtagatacttaaggaaagaacgtagctataaccattgaacaaaaggaacatgccatacgataaaatttacagctgtctctcaaataactctatttctcttcatttcctagtccctattcaattaaatcgatgctggatttagagttggatttggctttcctaccctaaaatccaagcatgttatttaacaaaattttaaagtttctgtgttatatcaagaagccaattgctgtaatacagcataaataatgaattagaggactatctttgtcttttcttggctctttctttcaaggcctataccctctcataattgttgtttttcaaggattgcctttcccagtacacatacatgtacaagcaaacattgctctgatgacacttatgttcgtgtcccatacacacaatgagaaccagcctgacaacaatccctgcatgctccggaaaaagaattggaccacacctccccggctgcgctggattcaactcactccatttcgactgacactccaaccagaacctggagtattgacttcaatcaagttgaggatttcaacctagatcttcaatcaagcaaatctcatctaacatggactagagataactcattagagactttccctgtactggcattttttttccccacaggaccccacatggctaccatcgtcccatttcagcaggaagtaacttagaagatgctagcccccgctccccattattgtttattaggttattgtaagcctagttaagaatgaccttattgtttagagttgggattggaaggaagtgttcaagttagacaccctttccacatgactttagggcttagccggaatagacataggatgtgcaatagcagataattgtatcttcttatatttcacctttatgattgttaatttttgatgttttacactattaagttttaatcctcttttagactaaaaggggaattgtagggagacaccctagccccaccccaggtaacctggacaggtgtgccgggacacgcccatgagggcggggtgaggggaagtctgaggtgacatgaaaggaggttcttaaagggctggagagacgtggggacccccttctctctggcctccctgccttgctgcctctgagcacgctctggctggtgctggtgtatctgaataaagaaaacctataccctattgacgactggtcgatccctaacaaatggggattgtggtgtttggatgatctaggcaggattttttttttcagattcctaatatatattaaaacacacctaaaccattctccctccctgatcttcagttcttactcctatttattgaacacacactgattctcttttctttgttttggttttgcttttttctttgtgtagccctggctgtcctggaacttactctgtagactagactagcttgaactctgagatctgcctgcctctgtctctcaagggctgggattaaaggtgtgtgctactatgcctgttacacactgcttcttatttcaccataaattcatctcccaatccctcccttcctcatagctcttcacctctcccagcaccagttactttggggggcgggggcaaggggataaggtgggttcacaggaaaaacaagcctttttcctaatcttcattcaaaataacttttgagattccaaaatagaaaaacaatgtattcttacaacttagaacatcatactaaatatttcaaaatagtaatgaaaaaatgatgctactatgacttgtgtctgaaatattcccccacaggctcatgttttcaacacttgttccctaattggtggcactgttggggaaggccatggaactttcagggagtgaagcctagtagaagcctaggtatctggggtgggcctttggggaccacacccacacctgcttccagcgtccctggtacaccaggaaccgggagcctccaccatgccttcccagccacaaggaactgaagccctcaaaaacggtggctcccaacctgtgggccatggcccctttggcaaaatctctatctccaaaaacacattatgattcataatagtagcaaaattagttatggagtagcaacaaaaataattatatgggctgggcgttggtggcgcacgcctttaatcccagcactctggaggcagaggcaggcggatgtatgtgagttcgaggccagcctggtctccagaatgagtgccaggataggctccaaagctacacagagaaaccctgtctccaaaaaaataaaataaataaaattctatggttaggggtcaccacaccatgagaagtggatttcagggtcgcagcattaggaagattgagaaccactactccagaaccatcctccaaaacaagtctttgcaccctcaagttgtctttgtcagctattgtggttacagcaatgtgaagacgactaagctgccaaggtgctgatatctgagcaatggtcatccagctgattttaaactacttgactttttacagggtttctggcttgtaatgcattattaaaagtatctttgaggcaaactctgaagtaggcattattatggagaaattgacactcaacagaaattaactggcttgccctgttctacagttgatatgccttcctagtgagaaatcgctgcacacacttagagattaataaaggaaagggctctttaatatggtacacatccagctctggctaatgctcaaagaggagctgatcttgagtagattttctaatttatactcaccataggcatgtgcgtctcatatataaacctctttcaggtcccagctccaagtcccactttgaacaatttaaacagataggagacggcaagtctggccacttggacagttgagagatgtacacaacaaagatattgccagaattatttattactatttcttaagcacaccagggttgttctttaatagttgttgcccaggtccatcttgttcacctggcagaattgtgcttttctggataagagcacagagacttaatggcagggtggttatgatccttgaacagcccctgagaggcatgctctttgatacgatacgagatatgtctgatagctggttgtcagtcagttttctccttttgctaggggaatagagcctaactggaagtcaatgttgataaataaatattggcagaaactttcttggcatctctaaacttcaattgtggaacaaatttttcatttctacagtttctaacaagtctgctgagtacactacttacctcccagtcatattggagacagcgctcctttagctaaattctacttggtgtaacttaatatttcctaatcacaattattagtaaatcctttgtagcatcaattttactacttcaagtttctccaacatcagcctgaaatctcgaattccttctttataacatagcatagaatgttgtgaaataatctttttgtttactgtgaagatgtgtctttgtcaaggcgccttttgattggtttaataagagctgaatgaccaatagctaggcaggaagaattagatgggacttccagggacacagagaggaaagaggaggtgaatctaggcacaggagaagtggcaggggacacagagaggaaagaggaggtgcaagatggaagagaggtaaaaacccacaggtgaaacgtagattatgacaaatgggttcatttgttataagagctggtgggacaagcctaagctataggctgagctttcgtaattaataataagtctctgagtcattttttgtgagctggtggcccaaagaaaaactcgtctataagagaacagaccaggactctaccagtatgaagagtaaggagacacatcaaattccacagcttttttttcctctctcatcctctgtcaatcctccaaacaaactgcccaggcaaagaagagcaactctgtggcccaggcagctttttccccatttaatgttcaatcagagatctttctgtaagcagaagagagtatgaagctccctgggcatgggctgttcaaccactgttttctttctcccagctatagtttacactgcaaacaatgattacaaatgacttttggtttggattcagctcctacactaggtcccaaagaatagacttaaagccaaaatggagtcacccatgataaagttaaaacactgccaaacagaaattcccccaggaaagccagtttcaatgggcatgataataaagtccttctgtcttaatctttggcaaaaaaaaaaaaaaaaaaagttgcctgcagtaacttgatgttaacttgtcaatgattctcctattgttctgtctcccttcccttataaggaaaaaaactccaaaatagccaatcagatctctccctagggaccaaggaaagcaggaacaccagtctcctctggtcaacagtgcttacccatttcaaggaatctataacctcagaggaaagccaatcaagaccttttaactaataatggttaaattttgttattattatgaataataatttttagatttttagactggttaatgttctctacttcagtctatttactattataagtgttctgaaacttagttttatttccttaaataaataaaaattgcattctctctgtgaagcaacattattactaaatatatctgttgttggtctttctccatgtggcctgaattcaactaatttaaaaactatgtatcaacagttgtcatttcttcatagtcgcttcttcaagacttgatcaaaatgctttccagtcccactggctggcttacattggcagctctaacactctcaaacagcaccctcaggagtttagggaatttttagcttcgtgtaagattttttttattattacaaggagttctagactcagctgagagacacttcctcagccacctacttacctctgcaatgaaatcatgtagctctccttcagtaggacagcatcccagtgacctgataattgttccaatctctctacaggaaaaaaaaaagttttagaatataagttctggaaaggcaagtatagtataaattatcaaataattatctaaattatttcagatcacaggtaataaagcaaatgacctcaagaatcggctcacaactctctgagaaactttctgggaaaagtaaatgatacacaaatgaaccaggacagaccagtgttttcactggctagcaaaatgcaagctctgactagttcaaaatctcagagctctagaggagagagcaggaggaagaaggaatggcagccacctgatggccgatttcaactgttgcttaactctaatggagaaggaaacagaatacacattaaatatttagcatgctaatatgcacctagctaatctaactctagccttgccctgtgggagcctcatgggtcctgcctgggggctagctactggacgaaatagaaacaggctgggttaaattttacttcactctgcttgctgtactcctgcttgcttcagttgaatcccgtcctcttatcttgaaaaagcaaatgcttacaaagctatctgtagaaatagttggccatatttgccaaagtaagaatgtcgcaatggctgcccacagcatctgcttctgtaaacacacttaaactgcaatagtaacatcccttcagtggtcatgagacccaaagacccaccctcgtatggtgggaaggaatcttcacacttgttcaaactatttaagttgtaagaaactgcaggatgggaccagactttgcaaaatactagctttggtccatcatgcctactggactccagctctctggatgctgcttggttttttgtcttttattttttgggttttataaatttgttttaattttatgtgcattggtgttttgctcgtatgtctgtgtgagggtgtcagatcttggagttgtgagctgccacgtgggtgctgagaattgaacccaggtactctggaaaaacagccagtgctcttaaccactgagccatctctccagtccctgcttggtttgaaagctggccttaggctctacatctgtagaatgatgatgctgttagctacatcagagttttgccatagaggctccattgctgacaaaaaaaaaaaaaaacataaagcatggtctccagcatcaaactgcagagggtgtgaaatcacaactccacagactggacaagttcccgacctaaatatacctaaaggcaaaacagccaggaccttcctccaaacacataaatgcatctggggacacagggagagtccaattatagtgtaatgtaaggcacagctgagggcaatacagccactcagtaagaattagttacactctttccctccttccccataacaatgaaattcaatccaacagataatctaagaaaagtatacattcaacttaatattctctgcaaatagctgggcattggtggcacaagccttttatcccagcacccaccagaggcaggtggatatctgtgaattcgagagcagcctggtctacaagagctagttccaggacagcctccaaagccacagagaaaccctgtctcgaaaaaaaaaaaaatctctgcaaataattatgggatttgtagtagattcttacacatttccattaagattgaagtaatatttgaatgttaattaaatttcacatacattggcttaatactttaatttccttaccattctggataatttggaattaattttatttgctgtgtattttacttgtgagaaaaaaacaaacactttaagaattattaaattatttgcttagaggctgtggtgagtgctaacaaaagagagaagccaaaccagcagtagggagacagggctctacctttgttgctcacatttcctcgtgacaaatgatcgtcaccacaccaggcaaggtgtactgctcagttttgtcaactcaacacaaactggagttatctagaaagagggaccctcaactgaggcactgcctcccccagagtctcctgaccattacaaaggacattagattcaaggatcttgttctgaaaagaaaaatggggacatagaaatgacaggataaaagggtagattattgaatctacttttaaagaaacaactattagtccttttttggttttttttttttttacttttctacttaaattagaaacaatcttattttacatgtcaatcccagttcctctccctcccatcctcctatgccccccaccaacccccttctcatcccttttctgctccatagaaggggtgaggccttccatgggggatcgtcaaagtctgtcacatcatttggggcagggtctaggccctcccccatgtgtctaggctgagagagtaactctctgtgtggaatgggctcccaatgtccattcatacactaggtataagtatttttccactatcagaggccatagagtaaccaggtctcctaactgacacccacgttcaggaagtctggatcagtcctatgctgatttcccagctatctgtttgggaaccatgagctcccccttgttcaggtcacctgtttctgtgagtcttcccaccctggtcttgacccttttgctcatcactcctccctctctacaactggatttcaggagttctgctcagtgcttagctgtgggtctctgcttctgcttccatcagctactggatcaaggctctaggatggcatataaggtagtcatcaatctcattataggggaagggcaattaaggtagcctctccactattgcttagattcttagttggggtcatccttgtggattgcagtataattccttagtgacatatttctcattaaacctataatggctccctctattttcttgctctcctctattcttcccctgactcaatcttcctggtccctcatgtcttcctcctcccttctcttctccccttctctttctcctaactccctctcccctcccctgtgctcccaattagctcacgagatcttgtccctttccccttcattggggaccatgtatgtctctcttagggtcctccttgtttcctagcttctctggaggtgtggattgtaggctggtgatcctttgctctatgtctaatatccatatatgagtgagtacataccatgtttgtctttttgtgactgggttacctcactcaggatggtttcttctagttccatccatttgcctgcagatttcaagattccattgttttgttttgttttgtttttccgctgagtaataccccattgtgtaaatgcaactactagtcttaaatatttcacattggtatggatttttatatattgttacaaatttaaagttaattttgttatactgtatatatgtttctaatcttgtttggggtatcatgtttatacaactcatttaaaaggcaatgtttaattaagaaatgcagattaatattcatctataatgatcaaacttataatcatgttaggaatgttttcaaaggcatacacagatatatttagatagatagacggtcttcaaacacttcaaagaactacagaatatggcatgtttaataacctaaggcttttcatgacaggagtcacatctgctcctgacagcactgatttccttcgagagaagatgatggtcatcgaagaacctccatatggagtttgctttctttatggcaaagaaaccgctctctgactcaaagcaaactgtattgtcagaatgagatcaaaacatcacacaacatctatgagcatgtctatgggtcattttcttgactaacagctgatgcaggagggcccagcccactatgagtggtgccaaccctggacagtggtcctgggctatataagaaaacaagcagcgtgagtatggagagcaagccagcaagcagtgttccttcttggttctgtttcagttcttgcctccagattcctgcttgagttccagccctggcttccctccatgatggactaagatgccaaagtataaaccaaataaacccttccctccctgagtttgttctggttacagcatctattacatcaacagaaatcaaactaacacagtcttcctgtcggtacattttcccttcctttgttccctctcatttcaaccctctgtattattaatttttttgaccatagggttatctaggcagatctgaacatgacggccactagaaatactttacaagattatattttctcttatgaagcctctagcggtatctcatgaaactgggtaacacccatataataaacatgcctttgaaacagcagattagccacttactgagtgcatgagaacaaatattccacaagacaagggtaacacttatgtcttgataggtttcggactttccccttcacaaaaccccttatcgggttttggttacaataagaactgcttaaactccagcatcagaggactaacaatcaaagctatgctaactcacacagcaaaaaagacagcagaaagggaggagacaaaaacctgacagctcctgtatagggaattgaagaaatctgaggttcctattgtccaatactgtcaatatatctggctcttaaacatgtgaaatgtggcaaaagaataaaatacactcagatttcaaaaatagtaaaaggagaatacaaacatctcacctgtatttaatattcaccataaatttaagatatgttaaatattaaaatattttagacatatatgtgtagtatattattaaactatagaactttagccaggcggtggtggcacacacctttagtcccagcactcaggaggcagaggcaggtggatctctgtaagttcaagaccagcctggtctacaagggctagttccaggacaggctccaacgccacagagaaaccctgtcttaaaaaaaaaaaaaaaaaaaaaaaaaaaaaaaaaaaaaactatagaactttgagggcaagagtggctgcacctcaagtcattgctcatgctgtctgcgatgtcactgaccaaggaatctcatgccactatcaatgaaacaagaacaggctaacctctgagcttacaagtaggggaaagccaaccagcgagatgaaactttcagagcactgagttacagaaaaagatctgagctggagacgcccagcagggatgggagtcacaggggcctgagggctcctctaagaagacagcaccaggagctgaagaggtggagcaatggttaagggcatctgctgttcttccagaggactcaggttcagttcccagaagccacaccaggcagctcccaaccatctatctatatctgcagatccaggatgtatgaggcccctggcctcctgtgagggcgcctgcgctcatgtgcacacaccacaagcagatacaaacatccacacactacaattaaaaataataaaaaataaaccttaaaaaataaaagagttcactggctgagcagggcacccacccagggagaatgctgagaagctctcacgtggcacagaaaaccttcatgggagagagaggacctgggagcaagcaaacacccaggggagggtagtgttgtggagctaaggaaaacaaggggaaagtgaagccatcactggtgctcggaggtgttcgaggaaggaagaagtggccgattctatagacagttctcacagactgcataactcccaatggagttggtaaagcaccaggtaagcagtgattgggatgaggagtttctgttcaaagtgggggtaagttagatggcaacggacggagaactacagacccgagaaatgaagggggggagcttccaaggagcatgaggcgggcgcacagggcttgtttatatttgggaggttatttgggaagtaggccacacacggaagccagggccttgtgaatgctaaagacaccctacttctgatcgccaaccgagcctgtctgcttaggtgggacatacatgcgaatcccagctctgctatgcactctttgagtcccaattcgtcattacaggctcgtccgcataagggtgtgtttatccctcattaaaaatgccaccttcgtattgtttagaaacgtacgtgcaagaaaccaaagacctctaaatatgctctgattttcatgttattttgaagaatacttcaatgacctatctggtttaagaacccgtcagcctttggaactactaggaaatactggacctttaagaagtaggatctatgggctgcagagatggctcagaggttaagagcactggctgctcttcctgaggtcctgagttcaattcccagcacccacatggtggctcacaacatctataagagatctggtgccctcctctggcctgcagggacacatggagacaaaacactgtacacataataaataagctatgtatttaaaaaaaaaaaaaagaagaagaagtggaaccctagcactggacagatggctcagctggtaaaagtgcttgctatgcaagcttgacaacctgagctcagaattcatttataggtgaaaagagaactgactccgcaaggtgtttctctaacctccacacatgcatgagggcacacacgagtgcatgggcacaaaaacaccagggggacctactggcaagtgactggaggtgtgcctctgaagacagcactgaaaccctggctccttctgtcactcctttgtttcgtggtctccatgccatgaacagaccaccttcatttccccttcctgccaagatgtactgcctggcactgccttgccacaggcgaagagcaatgggccaaccatggggtaaaacctcagaaaccatgacacaaaagacaccttccaggcaaatgagacagcacactcagtgggtaaaagagcctgctgcacaagctgaccaaactgagttcaatccccaaaatccacagtagaaggaggaaaagcaactctcaagtttgacctctgaccccaagtacgtgtaaacacaggctaataatcaattttttaaaaaatttaaataatcattctctttttaatttgattaactcacatgtcttattatagtgattaaaaacaaacaagaatcaacaatcaacggtcattaatatccctcaatctcaatggtcttaacttgcctatgaaaagacacaggctaaccgaatgactacaaagacagaacccatccttctgctgcatacaagaaacacatctcaacttcaaagacagacattacctcagagttaagggttgggaaaagatttttccaagcaaatggccctaagaagcaagctgatgtagctatcctaatatctaagaaattagacttcaaattaaaattaatcaaaagagatgaagaaggtcatttcatattcatcacaggaaaaatccatcaagatgaagtctcagttctgaacatctatgccccaaatacaaaggcatccacattcgtaaaaaaaaaaaaaaaaattactaaaactcaaatcacacattaacctcacacacttatagtgggagacttcaacactccactcttaccactggacaggactaccagacagaaacttaacaaagaaacaaaggaactaacaaaagttatgacccatttgggtttaacagacatctatagaacattccatccaaacacaaaagaatataccttctcagcaccacatggaacattctctaaaatcgaccacatactcagcaataaagcaaacctcaatagacacacacacacaaaaaaaattggaataacaccctgtatcttatcagaccaccatggcttaaaattagaattcagcaacaacacaaattgcagaaaacctacaaactcatggaaattgaacaatgctcaactgcatcactcctgggtcaaggaagaaataaagaaaaaaatcaaagactttctagaattcaatgagaatgaagacacaacatactcaaacctatgggacactctgaaagcagagcaaggaggaaagttcataacactaagtgcccacatgaagaaactggagaatagccacactagagaattaacagcgcacctgaaagctctagaacaaaaaaagcaaactcacccaggaggagtagacaccaggaaatcaatagtagaaacaaagaaaacaatacaaagaatcaatgaaacaaagagttggttctttgagaaaatcaacaagatagacaaacctttatccaaactaaccaaaggcagaaagagcgcatgcaaattaacaaaatcagaaatgaaaagggggatgtaacaacagacaatggggaagtctagagaatcatcaggtcatactttgaaaacctgtactccacaaattgtaaaatttaagggaaatggacaattttctggatggatatcacttgccaaaattaaatcaagaacagataagcaatttaaatagacctataaccccaaatgaaatagaagcagtcatcaaaaatctcccaaccaaaaaaagcccaaggccagactcagtgctgaattctaccagaaattcaaagaagagctaataccaatactcctcaaattgttccacacaatagaagcagaaggatcattgctaaactctttttatgaggctacaattaccttggtacccaaaccacacaaagacacaactaagaaaccaatcttcctcatgaacattgatgcaaaaatattcaataaaatactggcaaatcgaatccaagaacacatcagaaaaatcatccaccattaacaagtaggcttcatcccagagatgcagggatggttcaacataacgaaaattcatctatgtaatctaccacataaacaaactgaaaaagaaaaaccacatgatcatctcactagatgctgaaaaagccttcaaaaaaattcaacaccccttcttgataaaggtcttggagagatcaggaataacaggaatatacctaaacataacaaaggcaatatacagcaaactgacagccaacatgaaattaaatggagagaaacttaatcaggaacaagacaaggctgtccactctctccatacctcttcaatattgtccttgaagttcttgatagagcaataagacaacaaaaagggatcaaggaatacaagttggaaaagttggaaaggaagaagtaaaactttcatatgcaaatgatataagagtttacataagtgaccagaagaattctaccagggaactcctacagctgataaacaccttcagcaaagtggcagaatacaagattaactcagctgggcggtgatggtgctcacgtttaatccaagtacttggaggcagaggcaggtggatctctgtgagtttgaggccagcctggtctacagagcaagttccaggacagcctccaaagccacagagaaaccctgtctcaaaaaaccaaaacgggaaaaaaaaaagattaactcaaaaaaatcagtagccgtactatatacagacaataaaggggctgagaaagaaatcagagaaacatcaccctttacaatagacacaaacaacataaaatatcttggggtaactctaaccaaacaagtgaaagacctgtatgataagaactttgagtcattaaagaaagaaattaaagaagataccagaaaatggaaagatctcctatgctattggataagtaggatcaacatagtgaaaatggcaatcttgccaaaagcaatctacagattcaatgcaatccccatcaaagtcccaaaacaattcttcatagaccttaaaagggcaatgctcaactttatatggaaaaacaaaaaacccaggatagccaaaagaaccctgtacaataaaggaacttctggaggcatcaccatccctgacttcaagctctactatagagctatagtaataaaaacagcttggtattggcacaaaaacagacaggtagactggtgaaatcgaattgaagaccctgatattaacccacacatctatgaacacctgattttttgacaaaaaagctaaaactatacaatggaaaaacaaaagcatcttcaacaagtggtgctgacataactggactctggcatatagaagattgcagttagatccatatctatcgccatgcacaaaacttaagtccaaatggacgaaagacctcaacataaatccagccacactgaacttcttggaagagaaggtgggaaatacccttgaatgaattggcacaggagaccgattcctaaacataacgctagtagcacagacactgagatagacaattaataaatgggacctcctgaaactgagacgcttctgtaatgcaaaggagacagtcagcaagacaaaatggcagcccacagactgggaaaagatattcaccaaccctgacagagggctgatttccaaaatacagaaagaactcaagaagctagtcaccaaagcaccaaataattcaattaaagagtgaggtacagatctaaacagacaattctcaatagagaaatctaaaatgtctgaaagacacatgagaaagtgttcaacatccttagtcatcagggaaatgcaaatcaaaacaactctgagataccatcttactcctgtcagaatggctaaaatctaaaacaccaatgacagtttatgctggagaggatgtggagaaagaggaacactcctccactgctggtgggagtgccaacccgtacagccactttggaaatcagtatggaggtttctccggaaaatgggaaccagtctatcacaagatccagccattccactctcaggcatgtacccaaaggatgcacattcatacaacaaggacatctgttcatctatgttcatagcaacattatgtgtaatagccagaacctggaagcaacctagatgccactcaactgaagaatggataaagaaaatgtggtacatttacacaatggagtactactcagtggggaaaaaaaaaaacaatggaatcttgaaattctcatgcaaatggatagaactagaagaaaccatcctgagtgaggtaacctagtcacagaaagacaaacatggtatgtactcactcatatatggttattagacatagagcaaaggattaatagcctacaatccatacctccagagaagctaggaaacaaggaggaccctaagagagacaaacatggtccccaatgaaaggaaagggacaagagtccctgaacaaatggggagaagggggggagggggaaggagaagaaagaggaggggagaagaggagaggaaagaacatgagggatcaggaaaattgagtggagtaatgaatagaggagaacaagaaaagagacacattaatagagggagccactataggtttaaagagaaatctggcactagggaattgtacagagatccacaaggatgaccccagctaggaatctaagcaacagtggaaaggctacctccttaaatgcccttccccgggctggagagatggctcagaggttaagagcactggctgctcttccagaggacccgaattcaattcccagcaaccacatggtgcctcacaactatctgtaatgagacctggtgcccccttctggtgtgtaagcaagcatgcagataactgtatacataataaataaataaaatcttttaaaaaatacccttcccctataatgagattgatgactaccttaaatgtcatcctagagccttgatccagtagctgatggaagcagaagcagagaccacagccaagcactgagccaaacttctggaatccagtttcagaaaggaaggagtgatgagcaaaggggtcaagaccatgctggaaaaacccacagaaacagctgacctgagcaagtgggaactcatggaccccagtctgacagctggggaaccaacataggatcaaaccaggccccctgaacatgggtgtcagctagaagcactgggcagttatggggcctctgtcagtggaaccaggatgtatccctagtgcacaaacagacttcgggagcccattccccatggagggagactctcttagcctagatacacaggggagggcctagaccctgccccaaatgacttgacagatttttttttgatgatccctcatggaaggcctcaccctccctggggagtggagggggatgggatgggggagtcggtgggggacatgggaggatgggagggagagggaactgggattgatatataaaataatatttttctaatttaaatttataaaaaaataaaaaataaataaatagactaaaaaaccctacacatacatggacataaagcctatgcttataagccaggtgtggtggcagaggcaggagaacctatgtgagttcacaaccagcctggtctgcagagtgagttctaggacagccaggactatgcagaaagacactgtgcaaaaaaaaagcaaaacaacaacaacaacaacaaccccatgcttacgtaagacaacaaggacaatctgcactggtgcattttaggcaaaaattacagcatctgcaacaattctccaatagtcagcaaagtgaaatatgtacagggaatatccaggtgagaacacgcagttcagcatacctgcaccatttatgtttgaccttttttaattcaaagattttaattttaaaaaagcacacttgattctcagaaatcaaaaccaaattaataacaaatgaaggcagaactctttcctaacatataaaacagtcttctcttttgtgttacataaactattactctggcttaaaaatctgattattgaagatgtttcgattcattcaaatattcatttcaattattcatttaatatataatgaatatattaattacaacattcttacactggacctcagatatgaaaatctggatagatctacaatagtgtctcaccaagggaaagtgggcaagagcctggccctcctttaagacagagagaagtacaggcaaaggatcaagtcgtttttcccttcctctaaacacaccaatgaaggcaacagtgtgagctcctgcctctatgatggtgagagctgtgtctgtactgaagacgagaagcacttccctgctaaatggcaggtgaacatgtggccagggaaagcagatcatgaggagttcccttcagtggcaatccagagaaggcaatgcagagaggggctgaggagatgatggcagggaaatcaggaagggacaggaaggtggcatttaaatgccactgtttctaaatatttcttgagatggtgaggaagtgagtgaggtgaatctattccagtgggcatccatgtgtgaggccctgggttcaatcctgaacaccagcagggatggaaagtccccaaggtctgtgaggtgggaggaaagggcaatcacagcagatgcctgggtgactcagagcttcccttgtgttctgtggcctggataaaactcaaggctggagacacagaagacgaagcaatcctctgagccactctcacacagcactggtgccaagaacatgggaacacagcagaaggggccaggtgggccctgcagagctccagatggctctagatgagctgagatgctatagggccattgtgaggaaatcgggatgctgatgctgcagccttaggagcagtgatgctcccaggggtgggagacagaaaaaagaacacaggtaagaaaaaggctagacctttgcgatgaaagacagggaggattaggaagggagaaaattgaaatggaaatgtagaaaaacaacaaaagagatgaaaactgccagatgtggtagcacacatttgtaatcccagcacttgggaaatggaagcaagaaaatcaggagttcaaacccttgcctacacagcaagttcaaagccagcctaggctacatgagaccctatctcaaaaacaaatcaacaacaaaaaaagaaaatataatgtttttgttttttccagacagggtttctctgtattgtttggggggttatcctggaactagctcttgtagtccaggctggaactagctcttgtagacagagatctgcctgcctctgcctcccgagtgctgggattaaaggtgtgcaccaccaacgcccggctgaaaatataatttcaggaaatacaaaacagaaatgccaacaaggaaaacatcgtgtgtgtgtgtgtgtgtgtgtgtgtgtgtgtgtgtgtgtgtgtgtgtgtgtgtgtaactagaaatgaaacaaatatatgaaataagaaagccatagtgggagggtcttctgaggaaggagaaatggaatgcggtgctataaaggaataaagaggaaactacaaggattatatggggtagggtagggaatatggggtggacaactcacactaaatggcttttaaatgaccatatgaaaatctactactgtagaagcttcctaaaatatatacacatataaaagaatgtaaatggagtcactatacaacggggcagacaataccccaagtaaatgttatatgttgccaaaaaaactcccagtaacaagaatgggttatatctttttgagtcattggccaaaggggttccctaaactcccccaaatactgcaagctattgctaacctgatgggaagaccctatcgttgaagagaccacacacttatggcacagaacacagacaaatggaagcagcactcagattcaccctgctagctagtcttcatgctgctacacgattcttttctttagtttttctagacccagtttctctgtgtagctttggaacctatcctggaactctctttgtagaccaggctggcttcaaattcacagaggttcacttacctctgcctccctggtgctgggattaaaggcgtgcgccaccactgcttagcctgctagaagattccatacacactacatgaagagaaaagtcatcatcaaatctcacccagctacaaaccccgtgagatttagtaatgacctacctgtaagatatgctcaccagtataatagtcacgtgaatgttagaagtaaccaaccactttttaaattaggtttaaggcccaacatgagtggaacccacacctaagactaaagtaggtcatgggccctggggaaagctactactattcatttgctaaatgatcatagaactaaaattattcctaatgacataatgctataccgatatatcttagttgggattttattgccatgaggagacaccatgaccaaggcaactcttataaaggaaaacatttaattggggctggctacagttcagagttttagtccattatcagcatggcaggaagtatggcagcatgcaggtgctagacaggaagctgagaatccaacatccagatgagcagacagcaggaaaaaaggggggctggcatgggcttctgaaaccccaaagcccacctcaagtgacacacttcctcctacaaggccacacctactccaataaggccacacctcctaataatggcgctccctgtgagcctagcctaggagggggttattttcatttaaacccccacaccatacatcagtgcattgctcaaccatcagcagagaagtttcttgcagtagatggtgagtagcacagtgacacacagctgagcagcatgcagagggtgagactctggaatgcccagtcctaagtgggatgtctttgtcacccccctctgtggaggtttgaggatctatgtgcaaagaggggaagaagttttcaaagagccagaggtgatggacacttttaaagaaatggccttttccagacaacagggaaaaggtatttacggactcacagactgtgacagcatgcccaagatctgcacaagttcaagcctggcaaaaatcccaatacaaaagaggggaagtgggcacaaggtcccacttccagcaaagaagcttttcaaagacgatagcttctgggcaaaggaaaatcaattttcttcaatggagtgattactgggtacatcaaccacactccagggcaggccccacgctcaggagcaaatagatggctaacacaatgagactctatgttttttatgacttatgaacacaaagatgggttggtagggagcagagaagaatcgtggaggagttggggaatgggaaataatatgataaaaatatactgtaagggcagggtgttggtggcgcacgcctttaatcccagcactcgggaggcaggggcaggtggatttctgtgagttcgaggccagcctggtctccagagcaagtgccatgataggctccaaagctacacagagaaaccctgtctcgaaaaatcaaatatatatataaagataaatagcaattacgagaagaaagcaatagctagaatgatataaaatgttaaacttggttaacctatttctagcaagtgagatttttgaataaagtgaactgactgaaaattattttgttttttattctcattttcatctcatttgtttttttgtttgtttgtttgggtgtgtatcggtgtaagactatgtgtctttttatatgtaccacatgcatctgggtacacaaggaggccagaagagggaatcagatcccctggagctggagttccagctgtccaacatgaatgctaggagccaaggccaggatctctgcaagtgttcttacctgctgagccatctctacagcctacacctttttaaaaatatgcaattaaactgagtttaagtattttttaatatcagctagtttttaacgatgttcagaacacttggaagtctctgatactgtgggtcactgccatttcagacagctgacacaggcctatctgtgcacaagctcatctccatggctgcagtgattaggaccaactcactctgtgatctaccatgcatacaaagcagaaatcaatacaactcttgtttaaattttttaaattttcttttgaaatattattttacaaatctttataaatctgttttacaggatttttaataatctgacaaaatgaaacaacatattttatataaatgttttaaaatatggaaactttcagtcaggtgttggtggcgcaggcctttaattcccagcactcaaaaggcagaggcaggtgtatctctgtgagttcaaggccagcctggtctacaagagcaagttctaggacagctagggctacacagagaaacccaaaaaacaaacaaaactatggaaacttccatattttatcaaaatacagaaatgtcctatattgatgaatacaaatcagctccaaagtcttctatttagaagaattcttttctgcatttataccatacagagagcaatatcatctagacaaacaagtcataataaacaccctgcagaggcctggggttggttattgacaagctgacattcaacaggtgtagtatcgtgttgtagacacaaggtggcaccagctccattgagatagactgagtgcacattaagggcagtcaaggtcaaaaaacacccgggtgaagagactgaggacatctgatgcaattttaagtggcaaaaggcagcaagcccattacctctttatagtactggtgcagctggggttgcactacatatcagtaaacttaacacaatctgggaatgtctaagaacaaagcagaattttagaaaatgggtttcattcattcaacaaacatttactgaagcctgctgtgctactgttaacagaagtggggagaacaaaacaaggaccctgccttcttcccctagtagggcacttttcatagatccacattattctgaagctaaaaaataaaataaagctaaaacaagggcaaaatctctaggactcaactatgctattcccaaaaggtggccctctggggtctttctggtcaactcgagagcctttaaaggactagaacaaaatgtttctggtttttaattgctgcagtgttatttcttcttcattcctgtgctagaggtcatggccccagaagaactcagggctctgtagaaaaccggacgttacagagacaggagcaggaacttaatgacacagctactttggctcagtgttgtgactgctgtggggaatgaaaagtcctggttccagccttggagcttacagccaggagggacaggctataaaca
